United States Patent Application Publication US 2024/0066114 A1 - sequence listing, part 24

SEQ ID NO: 28451 - RNA, 6058 nt, Artificial Sequence
  SARS-CoV-2/Wuhan-Hu-1__NC_045512.2/MN908947.2__non-structural protein 3 (NSP3) mRNA gc (1-1946)(T238A_T721I_N1330D)
aggagaaagcuuaccauggcccccaccaaggugaccuucggcgacgacaccgucaucgaggugcagggguacaagagcgugaacaucaccuucgagcuggacgagcgcaucgacaagguccucaacgagaagugcuccgccuacaccguggagcugggcaccgaggugaacgaguucgcgugcgucguggccgacgccgugaucaagacgcugcagccggucagcgagcuccugacgccccuggggaucgaccucgacgagugguccauggccaccuacuaccuguucgacgagagcggcgaguucaagcuggccucccacauguacugcagcuucuacccgcccgacgaggacgaggaggagggggacugcgaggaggaggaguucgagcccuccacccaguacgaguacggcacggaggacgacuaccagggcaagccccucgaguucggggcgaccagcgccgcccugcagcccgaggaggagcaggaggaggacuggcuggacgacgacucccagcagaccgugggccagcaggacgggagcgaggacaaccagaccacgaccauccagaccaucguggagguccagccccagcucgagauggagcugaccccgguggugcagacgaucgaggucaacuccuucagcggcuaccugaagcucaccgacaacguguacaucaagaacgccgacaucguggaggaggcgaagaaggucaagcccgccgugguggucaacgccgccaacguguaccugaagcacgggggcggcguggccggggcccugaacaaggcgaccaacaacgccaugcaggucgaguccgacgacuacaucgccacgaacggcccccucaaggucgggggcagcugcgugcuguccggccacaaccuggccaagcacugccuccacgugguggggcccaacgucaacaagggcgaggacauccagcugcucaagagcgccuacgagaacuucaaccagcacgaggugcugcuggcgccgcugcucuccgccgggaucuucggcgccgaccccauccacagccugcgggugugcgucgacaccgugcgcaccaacguguaccuggccgucuucgacaagaaccucuacgacaagcugguguccagcuuccuggagaugaaguccgagaagcaggucgagcagaagaucgccgagauccccaaggaggaggugaagcccuucaucaccgagagcaagccgagcguggagcagcggaagcaggacgacaagaagaucaaggcgugcguggaggaggucacgaccacccucgaggagaccaaguuccugacggagaaccugcuccuguacaucgacaucaacgggaaccugcaccccgacuccgccacccucgugagcgacaucgacaucaccuuccugaagaaggacgcccccuacaucgugggcgacgucgugcaggagggcgugcugaccgccgucgugauccccacgaagaaggccgggggcaccaccgagaugcucgcgaaggcccugcgcaaggugccgaccgacaacuacaucacgaccuaccccgggcagggccugaacggguacaccgucgaggaggccaagaccgugcucaagaagugcaaguccgccuucuacauccugcccagcaucaucuccaacgagaagcaggagauccugggcaccgugagcuggaaccugcgggagaugcucgcgcacgccgaggagacgcgcaagcugaugcccgucugcguggagaccaaggccaucguguccaccauccagcggaaguacaagggcaucaagauccaggagggggucguggacuacggcgcccgcuucuacuucuacaccagcaagacgaccguggccucccugaucaacacccucaacgaccugaacgagacccuggucacgaugccgcucggguacgugacccacggccugaaccuggaggaggcggcccgguacaugcgcagccucaaggugcccgccaccgucuccgugagcucccccgacgccgugaccgccuacaacggguaccugacgagcuccagcaagacccccgaggagcacuucaucgagaccaucucccuggcgggcagcuacaaggacuggagcuacuccggccagagcacccagcucgggaucgaguuccugaagcggggcgacaaguccgucuacuacaucagcaacccgaccaccuuccaccuggacggggaggugaucaccuucgacaaccucaagacgcugcugucccuccgcgaggugcggaccaucaaggucuucaccaccguggacaacaucaaccugcacacccagguggucgacaugagcaugaccuacggccagcaguucggccccaccuaccuggacggggccgacgugaccaagaucaagccccacaacucccacgagggcaagacguucuacgugcucccgaacgacgacacccugcgcgucgaggccuucgaguacuaccacaccaccgaccccagcuuccuggggcgguacauguccgcccucaaccacacgaagaaguggaaguacccccaggugaacggccugaccagcaucaagugggccgacaacaacugcuaccuggcgaccgcccuccugacccugcagcagaucgagcucaaguucaacccgcccgcccugcaggacgccuacuaccgcgcgcgggccggggaggccgccaacuucugcgcccugauccucgcguacugcaacaagacggugggcgagcugggcgacguccgcgagaccauguccuaccuguuccagcacgccaaccucgacagcugcaagcgggugcugaacgucgugugcaagaccugcgggcagcagcagaccacccugaagggcguggaggccgucauguacauggggacgcucuccuacgagcaguucaagaagggcgugcagauccccugcacgugcgggaagcaggccaccaaguaccuggugcagcaggagagccccuucgucaugauguccgcgcccccggcccaguacgagcugaagcacggcaccuucacgugcgccagcgaguacaccggcaacuaccagugcgggcacuacaagcacaucaccuccaaggagacccucuacugcaucgacggcgcccugcugaccaagagcagcgaguacaaggggcccaucaccgacguguucuacaaggagaacuccuacaccaccacgaucaagcccgugaccuacaagcucgacggcgucgugugcaccgagaucgaccccaagcuggacaacuacuacaagaaggacaacagcuacuucaccgagcagccgaucgaccuggugcccaaccagcccuaccccaacgccuccuucgacaacuucaaguucgucugcgacaacaucaaguucgccgacgaccucaaccagcugacgggguacaagaagccggcgagccgcgagcugaaggugaccuucuuccccgaccucaacggcgacguggucgccaucgacuacaagcacuacacccccuccuucaagaagggcgccaagcugcugcacaagcccaucguguggcacgugaacaacgccaccaacaaggcgacguacaagccgaacaccuggugcauccggugccucuggagcaccaagcccgucgagaccuccaacagcuucgacgugcugaaguccgaggacgcccaggggauggacaaccuggccugcgaggaccucaagcccgugagcgaggaggucguggagaaccccacgauccagaaggacgugcuggagugcaacgucaagaccaccgagguggugggcgacaucauccugaagccggccaacaacucccucaagaucaccgaggaggucgggcacacggaccugauggccgcguacguggacaacagcucccugaccaucaagaagcccaacgagcucagccgcgugcugggccugaagacccucgccacccacgggcuggccgccgucaacuccgugcccugggacacgaucgccaacuacgcgaagccguuccuggacaagguggucagcaccaccaccaacaucgugacgcgcugccucaaccgggugugcaccaacuacaugcccuacuucuucacccugcugcuccagcugugcaccuucacgcgcuccaccaacagccggaucaaggccuccaugcccaccaccaucgccaagaacaccgucaagagcgugggcaaguucugccuggaggccagcuucaacuaccucaagucccccaacuucagcaagcugaucaacaucaucaucugguuccugcuccuguccgugugccugggcagccucaucuacuccacggccgcgcuggggguccugaugagcaaccucggcaugccguccuacugcaccggguaccgcgagggcuaccugaacagcaccaacgugaccaucgccacguacugcaccggcuccauccccugcagcgugugccuguccgggcucgacagccuggacaccuaccccucccuggagaccauccagaucacgaucagcuccuucaagugggaccucaccgccuucggccuggucgccgagugguuccuggccuacauccucuucacccgguucuucuacgugcuggggcuggcggccaucaugcagcuguucuucagcuacuucgccgugcacuucaucuccaacagcuggcucauguggcugaucaucaaccugguccagauggcccccaucuccgcgauggugcgcauguacaucuucuucgccagcuucuacuacguguggaaguccuacguccacgugguggacggcugcaacagcagcacgugcaugaugugcuacaagcggaaccgcgccacgcgggucgagugcaccaccaucgugaacgggguccgccgguccuucuacguguacgccaacggcggcaagggguucugcaagcuccacaacuggaacugcgugaacugcgacaccuucugcgccggcagcacguucaucuccgacgaggucgcgcgcgaccugagccugcaguucaagcggccgaucaaccccaccgaccaguccagcuacaucguggacuccgugaccgucaagaacgggagcauccaccucuacuucgacaaggccggccagaagaccuacgagcgccacucccugagccacuucgugaaccuggacaaccuccgggccaacaacacgaaggggucccugcccaucaacgugaucgucuucgacggcaagagcaagugcgaggaguccagcgccaaguccgccagcguguacuacucccagcugaugugccagcccauccuccugcuggaccaggcgcucgugagcgacgucggcgacagcgccgagguggccgugaagauguucgacgccuacgucaacaccuucuccagcaccuucaacgugccgauggagaagcugaagacccugguggccacggcggaggccgagcucgccaagaacgucucccuggacaacgugcugagcaccuucaucuccgccgcgcgccagggguucguggacagcgacgucgagaccaaggacgugguggagugccucaagcugucccaccagagcgacaucgaggucaccggcgacuccugcaacaacuacaugcugacguacaacaagguggagaacaugacgccccgggaccucggggccugcaucgacugcagcgcccgccacaucaacgcccagguggccaagucccacaacaucgcgcugaucuggaacgucaaggacuucaugagccuguccgagcagcuccggaagcagauccgcagcgccgccaagaagaacaaccugcccuucaagcugaccugcgccaccacccgccagguggugaacgucgugaccaccaagaucgcccucaagggcgggugaggacuaguuauaagacugacuagcccgaugggccucccaacgggcccuccuccccuccuugcaccgagauuaauaaaaaaaaaaaaaaaaaaaaaaaaaaaaaaaaaaaaaaaaaaaaaaaaaaaaaaaaaaaaaaaaugcaucccccccccccccccccccccccccccccccaaaggcucuuuucagagccaccagaauu

SEQ ID NO: 28452 - RNA, 6058 nt, Artificial Sequence
  SARS-CoV-2/Wuhan-Hu-1__NC_045512.2/MN908947.2__non-structural protein 3 (NSP3) mRNA gc (1-1946)(H343Y_P823L_K928I_N1588S)
aggagaaagcuuaccauggcccccaccaaggugaccuucggcgacgacaccgucaucgaggugcagggguacaagagcgugaacaucaccuucgagcuggacgagcgcaucgacaagguccucaacgagaagugcuccgccuacaccguggagcugggcaccgaggugaacgaguucgcgugcgucguggccgacgccgugaucaagacgcugcagccggucagcgagcuccugacgccccuggggaucgaccucgacgagugguccauggccaccuacuaccuguucgacgagagcggcgaguucaagcuggccucccacauguacugcagcuucuacccgcccgacgaggacgaggaggagggggacugcgaggaggaggaguucgagcccuccacccaguacgaguacggcacggaggacgacuaccagggcaagccccucgaguucggggcgaccagcgccgcccugcagcccgaggaggagcaggaggaggacuggcuggacgacgacucccagcagaccgugggccagcaggacgggagcgaggacaaccagaccacgaccauccagaccaucguggagguccagccccagcucgagauggagcugaccccgguggugcagacgaucgaggucaacuccuucagcggcuaccugaagcucaccgacaacguguacaucaagaacgccgacaucguggaggaggcgaagaaggucaagcccaccgugguggucaacgccgccaacguguaccugaagcacgggggcggcguggccggggcccugaacaaggcgaccaacaacgccaugcaggucgaguccgacgacuacaucgccacgaacggcccccucaaggucgggggcagcugcgugcuguccggccacaaccuggccaagcacugccuccacgugguggggcccaacgucaacaagggcgaggacauccagcugcucaagagcgccuacgagaacuucaaccagcacgaggugcugcuggcgccgcugcucuccgccgggaucuucggcgccgaccccaucuacagccugcgggugugcgucgacaccgugcgcaccaacguguaccuggccgucuucgacaagaaccucuacgacaagcugguguccagcuuccuggagaugaaguccgagaagcaggucgagcagaagaucgccgagauccccaaggaggaggugaagcccuucaucaccgagagcaagccgagcguggagcagcggaagcaggacgacaagaagaucaaggcgugcguggaggaggucacgaccacccucgaggagaccaaguuccugacggagaaccugcuccuguacaucgacaucaacgggaaccugcaccccgacuccgccacccucgugagcgacaucgacaucaccuuccugaagaaggacgcccccuacaucgugggcgacgucgugcaggagggcgugcugaccgccgucgugauccccacgaagaaggccgggggcaccaccgagaugcucgcgaaggcccugcgcaaggugccgaccgacaacuacaucacgaccuaccccgggcagggccugaacggguacaccgucgaggaggccaagaccgugcucaagaagugcaaguccgccuucuacauccugcccagcaucaucuccaacgagaagcaggagauccugggcaccgugagcuggaaccugcgggagaugcucgcgcacgccgaggagacgcgcaagcugaugcccgucugcguggagaccaaggccaucguguccaccauccagcggaaguacaagggcaucaagauccaggagggggucguggacuacggcgcccgcuucuacuucuacaccagcaagacgaccguggccucccugaucaacacccucaacgaccugaacgagacccuggucacgaugccgcucggguacgugacccacggccugaaccuggaggaggcggcccgguacaugcgcagccucaaggugcccgccaccgucuccgugagcucccccgacgccgugaccgccuacaacggguaccugacgagcuccagcaagacccccgaggagcacuucaucgagaccaucucccuggcgggcagcuacaaggacuggagcuacuccggccagagcacccagcucgggaucgaguuccugaagcggggcgacaaguccgucuacuacacgagcaacccgaccaccuuccaccuggacggggaggugaucaccuucgacaaccucaagacgcugcugucccuccgcgaggugcggaccaucaaggucuucaccaccguggacaacaucaaccugcacacccagguggucgacaugagcaugaccuacggccagcaguucggccccaccuaccuggacggggccgacgugaccaagaucaagccccacaacucccacgagggcaagacguucuacgugcucccgaacgacgacacccugcgcgucgaggccuucgaguacuaccacaccaccgaccugagcuuccuggggcgguacauguccgcccucaaccacacgaagaaguggaaguacccccaggugaacggccugaccagcaucaagugggccgacaacaacugcuaccuggcgaccgcccuccugacccugcagcagaucgagcucaaguucaacccgcccgcccugcaggacgccuacuaccgcgcgcgggccggggaggccgccaacuucugcgcccugauccucgcguacugcaacaagacggugggcgagcugggcgacguccgcgagaccauguccuaccuguuccagcacgccaaccucgacagcugcauccgggugcugaacgucgugugcaagaccugcgggcagcagcagaccacccugaagggcguggaggccgucauguacauggggacgcucuccuacgagcaguucaagaagggcgugcagauccccugcacgugcgggaagcaggccaccaaguaccuggugcagcaggagagccccuucgucaugauguccgcgcccccggcccaguacgagcugaagcacggcaccuucacgugcgccagcgaguacaccggcaacuaccagugcgggcacuacaagcacaucaccuccaaggagacccucuacugcaucgacggcgcccugcugaccaagagcagcgaguacaaggggcccaucaccgacguguucuacaaggagaacuccuacaccaccacgaucaagcccgugaccuacaagcucgacggcgucgugugcaccgagaucgaccccaagcuggacaacuacuacaagaaggacaacagcuacuucaccgagcagccgaucgaccuggugcccaaccagcccuaccccaacgccuccuucgacaacuucaaguucgucugcgacaacaucaaguucgccgacgaccucaaccagcugacgggguacaagaagccggcgagccgcgagcugaaggugaccuucuuccccgaccucaacggcgacguggucgccaucgacuacaagcacuacacccccuccuucaagaagggcgccaagcugcugcacaagcccaucguguggcacgugaacaacgccaccaacaaggcgacguacaagccgaacaccuggugcauccggugccucuggagcaccaagcccgucgagaccuccaacagcuucgacgugcugaaguccgaggacgcccaggggauggacaaccuggccugcgaggaccucaagcccgugagcgaggaggucguggagaaccccacgauccagaaggacgugcuggagugcaacgucaagaccaccgagguggugggcgacaucauccugaagccggccaacaacucccucaagaucaccgaggaggucgggcacacggaccugauggccgcguacguggacaacagcucccugaccaucaagaagcccaacgagcucagccgcgugcugggccugaagacccucgccacccacgggcuggccgccgucaacuccgugcccugggacacgaucgccaacuacgcgaagccguuccugaacaagguggucagcaccaccaccaacaucgugacgcgcugccucaaccgggugugcaccaacuacaugcccuacuucuucacccugcugcuccagcugugcaccuucacgcgcuccaccaacagccggaucaaggccuccaugcccaccaccaucgccaagaacaccgucaagagcgugggcaaguucugccuggaggccagcuucaacuaccucaagucccccaacuucagcaagcugaucaacaucaucaucugguuccugcuccuguccgugugccugggcagccucaucuacuccacggccgcgcuggggguccugaugagcaaccucggcaugccguccuacugcaccggguaccgcgagggcuaccugaacagcaccaacgugaccaucgccacguacugcaccggcuccauccccugcagcgugugccuguccgggcucgacagccuggacaccuaccccucccuggagaccauccagaucacgaucagcuccuucaagugggaccucaccgccuucggccuggucgccgagugguuccuggccuacauccucuucacccgguucuucuacgugcuggggcuggcggccaucaugcagcuguucuucagcuacuucgccgugcacuucaucuccaacagcuggcucauguggcugaucaucaaccugguccagauggcccccaucuccgcgauggugcgcauguacaucuucuucgccagcuucuacuacguguggaaguccuacguccacgugguggacggcugcagcagcagcacgugcaugaugugcuacaagcggaaccgcgccacgcgggucgagugcaccaccaucgugaacgggguccgccgguccuucuacguguacgccaacggcggcaagggguucugcaagcuccacaacuggaacugcgugaacugcgacaccuucugcgccggcagcacguucaucuccgacgaggucgcgcgcgaccugagccugcaguucaagcggccgaucaaccccaccgaccaguccagcuacaucguggacuccgugaccgucaagaacgggagcauccaccucuacuucgacaaggccggccagaagaccuacgagcgccacucccugagccacuucgugaaccuggacaaccuccgggccaacaacacgaaggggucccugcccaucaacgugaucgucuucgacggcaagagcaagugcgaggaguccagcgccaaguccgccagcguguacuacucccagcugaugugccagcccauccuccugcuggaccaggcgcucgugagcgacgucggcgacagcgccgagguggccgugaagauguucgacgccuacgucaacaccuucuccagcaccuucaacgugccgauggagaagcugaagacccugguggccacggcggaggccgagcucgccaagaacgucucccuggacaacgugcugagcaccuucaucuccgccgcgcgccagggguucguggacagcgacgucgagaccaaggacgugguggagugccucaagcugucccaccagagcgacaucgaggucaccggcgacuccugcaacaacuacaugcugacguacaacaagguggagaacaugacgccccgggaccucggggccugcaucgacugcagcgcccgccacaucaacgcccagguggccaagucccacaacaucgcgcugaucuggaacgucaaggacuucaugagccuguccgagcagcuccggaagcagauccgcagcgccgccaagaagaacaaccugcccuucaagcugaccugcgccaccacccgccagguggugaacgucgugaccaccaagaucgcccucaagggcgggugaggacuaguuauaagacugacuagcccgaugggccucccaacgggcccuccuccccuccuugcaccgagauuaauaaaaaaaaaaaaaaaaaaaaaaaaaaaaaaaaaaaaaaaaaaaaaaaaaaaaaaaaaaaaaaaaugcaucccccccccccccccccccccccccccccccaaaggcucuuuucagagccaccagaauu

SEQ ID NO: 28453 - RNA, 6058 nt, Artificial Sequence
  SARS-CoV-2/Wuhan-Hu-1__NC_045512.2/MN908947.2__non-structural protein 3 (NSP3) mRNA gc (1-1946)(E379V_K1694N)
aggagaaagcuuaccauggcccccaccaaggugaccuucggcgacgacaccgucaucgaggugcagggguacaagagcgugaacaucaccuucgagcuggacgagcgcaucgacaagguccucaacgagaagugcuccgccuacaccguggagcugggcaccgaggugaacgaguucgcgugcgucguggccgacgccgugaucaagacgcugcagccggucagcgagcuccugacgccccuggggaucgaccucgacgagugguccauggccaccuacuaccuguucgacgagagcggcgaguucaagcuggccucccacauguacugcagcuucuacccgcccgacgaggacgaggaggagggggacugcgaggaggaggaguucgagcccuccacccaguacgaguacggcacggaggacgacuaccagggcaagccccucgaguucggggcgaccagcgccgcccugcagcccgaggaggagcaggaggaggacuggcuggacgacgacucccagcagaccgugggccagcaggacgggagcgaggacaaccagaccacgaccauccagaccaucguggagguccagccccagcucgagauggagcugaccccgguggugcagacgaucgaggucaacuccuucagcggcuaccugaagcucaccgacaacguguacaucaagaacgccgacaucguggaggaggcgaagaaggucaagcccaccgugguggucaacgccgccaacguguaccugaagcacgggggcggcguggccggggcccugaacaaggcgaccaacaacgccaugcaggucgaguccgacgacuacaucgccacgaacggcccccucaaggucgggggcagcugcgugcuguccggccacaaccuggccaagcacugccuccacgugguggggcccaacgucaacaagggcgaggacauccagcugcucaagagcgccuacgagaacuucaaccagcacgaggugcugcuggcgccgcugcucuccgccgggaucuucggcgccgaccccauccacagccugcgggugugcgucgacaccgugcgcaccaacguguaccuggccgucuucgacaagaaccucuacgacaagcugguguccagcuuccuggagaugaaguccgugaagcaggucgagcagaagaucgccgagauccccaaggaggaggugaagcccuucaucaccgagagcaagccgagcguggagcagcggaagcaggacgacaagaagaucaaggcgugcguggaggaggucacgaccacccucgaggagaccaaguuccugacggagaaccugcuccuguacaucgacaucaacgggaaccugcaccccgacuccgccacccucgugagcgacaucgacaucaccuuccugaagaaggacgcccccuacaucgugggcgacgucgugcaggagggcgugcugaccgccgucgugauccccacgaagaaggccgggggcaccaccgagaugcucgcgaaggcccugcgcaaggugccgaccgacaacuacaucacgaccuaccccgggcagggccugaacggguacaccgucgaggaggccaagaccgugcucaagaagugcaaguccgccuucuacauccugcccagcaucaucuccaacgagaagcaggagauccugggcaccgugagcuggaaccugcgggagaugcucgcgcacgccgaggagacgcgcaagcugaugcccgucugcguggagaccaaggccaucguguccaccauccagcggaaguacaagggcaucaagauccaggagggggucguggacuacggcgcccgcuucuacuucuacaccagcaagacgaccguggccucccugaucaacacccucaacgaccugaacgagacccuggucacgaugccgcucggguacgugacccacggccugaaccuggaggaggcggcccgguacaugcgcagccucaaggugcccgccaccgucuccgugagcucccccgacgccgugaccgccuacaacggguaccugacgagcuccagcaagacccccgaggagcacuucaucgagaccaucucccuggcgggcagcuacaaggacuggagcuacuccggccagagcacccagcucgggaucgaguuccugaagcggggcgacaaguccgucuacuacacgagcaacccgaccaccuuccaccuggacggggaggugaucaccuucgacaaccucaagacgcugcugucccuccgcgaggugcggaccaucaaggucuucaccaccguggacaacaucaaccugcacacccagguggucgacaugagcaugaccuacggccagcaguucggccccaccuaccuggacggggccgacgugaccaagaucaagccccacaacucccacgagggcaagacguucuacgugcucccgaacgacgacacccugcgcgucgaggccuucgaguacuaccacaccaccgaccccagcuuccuggggcgguacauguccgcccucaaccacacgaagaaguggaaguacccccaggugaacggccugaccagcaucaagugggccgacaacaacugcuaccuggcgaccgcccuccugacccugcagcagaucgagcucaaguucaacccgcccgcccugcaggacgccuacuaccgcgcgcgggccggggaggccgccaacuucugcgcccugauccucgcguacugcaacaagacggugggcgagcugggcgacguccgcgagaccauguccuaccuguuccagcacgccaaccucgacagcugcaagcgggugcugaacgucgugugcaagaccugcgggcagcagcagaccacccugaagggcguggaggccgucauguacauggggacgcucuccuacgagcaguucaagaagggcgugcagauccccugcacgugcgggaagcaggccaccaaguaccuggugcagcaggagagccccuucgucaugauguccgcgcccccggcccaguacgagcugaagcacggcaccuucacgugcgccagcgaguacaccggcaacuaccagugcgggcacuacaagcacaucaccuccaaggagacccucuacugcaucgacggcgcccugcugaccaagagcagcgaguacaaggggcccaucaccgacguguucuacaaggagaacuccuacaccaccacgaucaagcccgugaccuacaagcucgacggcgucgugugcaccgagaucgaccccaagcuggacaacuacuacaagaaggacaacagcuacuucaccgagcagccgaucgaccuggugcccaaccagcccuaccccaacgccuccuucgacaacuucaaguucgucugcgacaacaucaaguucgccgacgaccucaaccagcugacgggguacaagaagccggcgagccgcgagcugaaggugaccuucuuccccgaccucaacggcgacguggucgccaucgacuacaagcacuacacccccuccuucaagaagggcgccaagcugcugcacaagcccaucguguggcacgugaacaacgccaccaacaaggcgacguacaagccgaacaccuggugcauccggugccucuggagcaccaagcccgucgagaccuccaacagcuucgacgugcugaaguccgaggacgcccaggggauggacaaccuggccugcgaggaccucaagcccgugagcgaggaggucguggagaaccccacgauccagaaggacgugcuggagugcaacgucaagaccaccgagguggugggcgacaucauccugaagccggccaacaacucccucaagaucaccgaggaggucgggcacacggaccugauggccgcguacguggacaacagcucccugaccaucaagaagcccaacgagcucagccgcgugcugggccugaagacccucgccacccacgggcuggccgccgucaacuccgugcccugggacacgaucgccaacuacgcgaagccguuccugaacaagguggucagcaccaccaccaacaucgugacgcgcugccucaaccgggugugcaccaacuacaugcccuacuucuucacccugcugcuccagcugugcaccuucacgcgcuccaccaacagccggaucaaggccuccaugcccaccaccaucgccaagaacaccgucaagagcgugggcaaguucugccuggaggccagcuucaacuaccucaagucccccaacuucagcaagcugaucaacaucaucaucugguuccugcuccuguccgugugccugggcagccucaucuacuccacggccgcgcuggggguccugaugagcaaccucggcaugccguccuacugcaccggguaccgcgagggcuaccugaacagcaccaacgugaccaucgccacguacugcaccggcuccauccccugcagcgugugccuguccgggcucgacagccuggacaccuaccccucccuggagaccauccagaucacgaucagcuccuucaagugggaccucaccgccuucggccuggucgccgagugguuccuggccuacauccucuucacccgguucuucuacgugcuggggcuggcggccaucaugcagcuguucuucagcuacuucgccgugcacuucaucuccaacagcuggcucauguggcugaucaucaaccugguccagauggcccccaucuccgcgauggugcgcauguacaucuucuucgccagcuucuacuacguguggaaguccuacguccacgugguggacggcugcaacagcagcacgugcaugaugugcuacaagcggaaccgcgccacgcgggucgagugcaccaccaucgugaacgggguccgccgguccuucuacguguacgccaacggcggcaagggguucugcaagcuccacaacuggaacugcgugaacugcgacaccuucugcgccggcagcacguucaucuccgacgaggucgcgcgcgaccugagccugcaguucaagcggccgaucaaccccaccgaccaguccagcuacaucguggacuccgugaccgucaagaacgggagcauccaccucuacuucgacaaggccggccagaacaccuacgagcgccacucccugagccacuucgugaaccuggacaaccuccgggccaacaacacgaaggggucccugcccaucaacgugaucgucuucgacggcaagagcaagugcgaggaguccagcgccaaguccgccagcguguacuacucccagcugaugugccagcccauccuccugcuggaccaggcgcucgugagcgacgucggcgacagcgccgagguggccgugaagauguucgacgccuacgucaacaccuucuccagcaccuucaacgugccgauggagaagcugaagacccugguggccacggcggaggccgagcucgccaagaacgucucccuggacaacgugcugagcaccuucaucuccgccgcgcgccagggguucguggacagcgacgucgagaccaaggacgugguggagugccucaagcugucccaccagagcgacaucgaggucaccggcgacuccugcaacaacuacaugcugacguacaacaagguggagaacaugacgccccgggaccucggggccugcaucgacugcagcgcccgccacaucaacgcccagguggccaagucccacaacaucgcgcugaucuggaacgucaaggacuucaugagccuguccgagcagcuccggaagcagauccgcagcgccgccaagaagaacaaccugcccuucaagcugaccugcgccaccacccgccagguggugaacgucgugaccaccaagaucgcccucaagggcgggugaggacuaguuauaagacugacuagcccgaugggccucccaacgggcccuccuccccuccuugcaccgagauuaauaaaaaaaaaaaaaaaaaaaaaaaaaaaaaaaaaaaaaaaaaaaaaaaaaaaaaaaaaaaaaaaaugcaucccccccccccccccccccccccccccccccaaaggcucuuuucagagccaccagaauu

SEQ ID NO: 28454 - RNA, 6058 nt, Artificial Sequence
  SARS-CoV-2/Wuhan-Hu-1__NC_045512.2/MN908947.2__non-structural protein 3 (NSP3) mRNA gc (1-1946)(T429I_P1470S_F1570V)
aggagaaagcuuaccauggcccccaccaaggugaccuucggcgacgacaccgucaucgaggugcagggguacaagagcgugaacaucaccuucgagcuggacgagcgcaucgacaagguccucaacgagaagugcuccgccuacaccguggagcugggcaccgaggugaacgaguucgcgugcgucguggccgacgccgugaucaagacgcugcagccggucagcgagcuccugacgccccuggggaucgaccucgacgagugguccauggccaccuacuaccuguucgacgagagcggcgaguucaagcuggccucccacauguacugcagcuucuacccgcccgacgaggacgaggaggagggggacugcgaggaggaggaguucgagcccuccacccaguacgaguacggcacggaggacgacuaccagggcaagccccucgaguucggggcgaccagcgccgcccugcagcccgaggaggagcaggaggaggacuggcuggacgacgacucccagcagaccgugggccagcaggacgggagcgaggacaaccagaccacgaccauccagaccaucguggagguccagccccagcucgagauggagcugaccccgguggugcagacgaucgaggucaacuccuucagcggcuaccugaagcucaccgacaacguguacaucaagaacgccgacaucguggaggaggcgaagaaggucaagcccaccgugguggucaacgccgccaacguguaccugaagcacgggggcggcguggccggggcccugaacaaggcgaccaacaacgccaugcaggucgaguccgacgacuacaucgccacgaacggcccccucaaggucgggggcagcugcgugcuguccggccacaaccuggccaagcacugccuccacgugguggggcccaacgucaacaagggcgaggacauccagcugcucaagagcgccuacgagaacuucaaccagcacgaggugcugcuggcgccgcugcucuccgccgggaucuucggcgccgaccccauccacagccugcgggugugcgucgacaccgugcgcaccaacguguaccuggccgucuucgacaagaaccucuacgacaagcugguguccagcuuccuggagaugaaguccgagaagcaggucgagcagaagaucgccgagauccccaaggaggaggugaagcccuucaucaccgagagcaagccgagcguggagcagcggaagcaggacgacaagaagaucaaggcgugcguggaggaggucacgaccacccucgaggagaucaaguuccugacggagaaccugcuccuguacaucgacaucaacgggaaccugcaccccgacuccgccacccucgugagcgacaucgacaucaccuuccugaagaaggacgcccccuacaucgugggcgacgucgugcaggagggcgugcugaccgccgucgugauccccacgaagaaggccgggggcaccaccgagaugcucgcgaaggcccugcgcaaggugccgaccgacaacuacaucacgaccuaccccgggcagggccugaacggguacaccgucgaggaggccaagaccgugcucaagaagugcaaguccgccuucuacauccugcccagcaucaucuccaacgagaagcaggagauccugggcaccgugagcuggaaccugcgggagaugcucgcgcacgccgaggagacgcgcaagcugaugcccgucugcguggagaccaaggccaucguguccaccauccagcggaaguacaagggcaucaagauccaggagggggucguggacuacggcgcccgcuucuacuucuacaccagcaagacgaccguggccucccugaucaacacccucaacgaccugaacgagacccuggucacgaugccgcucggguacgugacccacggccugaaccuggaggaggcggcccgguacaugcgcagccucaaggugcccgccaccgucuccgugagcucccccgacgccgugaccgccuacaacggguaccugacgagcuccagcaagacccccgaggagcacuucaucgagaccaucucccuggcgggcagcuacaaggacuggagcuacuccggccagagcacccagcucgggaucgaguuccugaagcggggcgacaaguccgucuacuacacgagcaacccgaccaccuuccaccuggacggggaggugaucaccuucgacaaccucaagacgcugcugucccuccgcgaggugcggaccaucaaggucuucaccaccguggacaacaucaaccugcacacccagguggucgacaugagcaugaccuacggccagcaguucggccccaccuaccuggacggggccgacgugaccaagaucaagccccacaacucccacgagggcaagacguucuacgugcucccgaacgacgacacccugcgcgucgaggccuucgaguacuaccacaccaccgaccccagcuuccuggggcgguacauguccgcccucaaccacacgaagaaguggaaguacccccaggugaacggccugaccagcaucaagugggccgacaacaacugcuaccuggcgaccgcccuccugacccugcagcagaucgagcucaaguucaacccgcccgcccugcaggacgccuacuaccgcgcgcgggccggggaggccgccaacuucugcgcccugauccucgcguacugcaacaagacggugggcgagcugggcgacguccgcgagaccauguccuaccuguuccagcacgccaaccucgacagcugcaagcgggugcugaacgucgugugcaagaccugcgggcagcagcagaccacccugaagggcguggaggccgucauguacauggggacgcucuccuacgagcaguucaagaagggcgugcagauccccugcacgugcgggaagcaggccaccaaguaccuggugcagcaggagagccccuucgucaugauguccgcgcccccggcccaguacgagcugaagcacggcaccuucacgugcgccagcgaguacaccggcaacuaccagugcgggcacuacaagcacaucaccuccaaggagacccucuacugcaucgacggcgcccugcugaccaagagcagcgaguacaaggggcccaucaccgacguguucuacaaggagaacuccuacaccaccacgaucaagcccgugaccuacaagcucgacggcgucgugugcaccgagaucgaccccaagcuggacaacuacuacaagaaggacaacagcuacuucaccgagcagccgaucgaccuggugcccaaccagcccuaccccaacgccuccuucgacaacuucaaguucgucugcgacaacaucaaguucgccgacgaccucaaccagcugacgggguacaagaagccggcgagccgcgagcugaaggugaccuucuuccccgaccucaacggcgacguggucgccaucgacuacaagcacuacacccccuccuucaagaagggcgccaagcugcugcacaagcccaucguguggcacgugaacaacgccaccaacaaggcgacguacaagccgaacaccuggugcauccggugccucuggagcaccaagcccgucgagaccuccaacagcuucgacgugcugaaguccgaggacgcccaggggauggacaaccuggccugcgaggaccucaagcccgugagcgaggaggucguggagaaccccacgauccagaaggacgugcuggagugcaacgucaagaccaccgagguggugggcgacaucauccugaagccggccaacaacucccucaagaucaccgaggaggucgggcacacggaccugauggccgcguacguggacaacagcucccugaccaucaagaagcccaacgagcucagccgcgugcugggccugaagacccucgccacccacgggcuggccgccgucaacuccgugcccugggacacgaucgccaacuacgcgaagccguuccugaacaagguggucagcaccaccaccaacaucgugacgcgcugccucaaccgggugugcaccaacuacaugcccuacuucuucacccugcugcuccagcugugcaccuucacgcgcuccaccaacagccggaucaaggccuccaugcccaccaccaucgccaagaacaccgucaagagcgugggcaaguucugccuggaggccagcuucaacuaccucaagucccccaacuucagcaagcugaucaacaucaucaucugguuccugcuccuguccgugugccugggcagccucaucuacuccacggccgcgcuggggguccugaugagcaaccucggcaugccguccuacugcaccggguaccgcgagggcuaccugaacagcaccaacgugaccaucgccacguacugcaccggcuccaucagcugcagcgugugccuguccgggcucgacagccuggacaccuaccccucccuggagaccauccagaucacgaucagcuccuucaagugggaccucaccgccuucggccuggucgccgagugguuccuggccuacauccucuucacccgguucuucuacgugcuggggcuggcggccaucaugcagcuguucuucagcuacuucgccgugcacuucaucuccaacagcuggcucauguggcugaucaucaaccugguccagauggcccccaucuccgcgauggugcgcauguacaucuucguggccagcuucuacuacguguggaaguccuacguccacgugguggacggcugcaacagcagcacgugcaugaugugcuacaagcggaaccgcgccacgcgggucgagugcaccaccaucgugaacgggguccgccgguccuucuacguguacgccaacggcggcaagggguucugcaagcuccacaacuggaacugcgugaacugcgacaccuucugcgccggcagcacguucaucuccgacgaggucgcgcgcgaccugagccugcaguucaagcggccgaucaaccccaccgaccaguccagcuacaucguggacuccgugaccgucaagaacgggagcauccaccucuacuucgacaaggccggccagaagaccuacgagcgccacucccugagccacuucgugaaccuggacaaccuccgggccaacaacacgaaggggucccugcccaucaacgugaucgucuucgacggcaagagcaagugcgaggaguccagcgccaaguccgccagcguguacuacucccagcugaugugccagcccauccuccugcuggaccaggcgcucgugagcgacgucggcgacagcgccgagguggccgugaagauguucgacgccuacgucaacaccuucuccagcaccuucaacgugccgauggagaagcugaagacccugguggccacggcggaggccgagcucgccaagaacgucucccuggacaacgugcugagcaccuucaucuccgccgcgcgccagggguucguggacagcgacgucgagaccaaggacgugguggagugccucaagcugucccaccagagcgacaucgaggucaccggcgacuccugcaacaacuacaugcugacguacaacaagguggagaacaugacgccccgggaccucggggccugcaucgacugcagcgcccgccacaucaacgcccagguggccaagucccacaacaucgcgcugaucuggaacgucaaggacuucaugagccuguccgagcagcuccggaagcagauccgcagcgccgccaagaagaacaaccugcccuucaagcugaccugcgccaccacccgccagguggugaacgucgugaccaccaagaucgcccucaagggcgggugaggacuaguuauaagacugacuagcccgaugggccucccaacgggcccuccuccccuccuugcaccgagauuaauaaaaaaaaaaaaaaaaaaaaaaaaaaaaaaaaaaaaaaaaaaaaaaaaaaaaaaaaaaaaaaaaugcaucccccccccccccccccccccccccccccccaaaggcucuuuucagagccaccagaauu

SEQ ID NO: 28455 - RNA, 6058 nt, Artificial Sequence
  SARS-CoV-2/Wuhan-Hu-1__NC_045512.2/MN908947.2__non-structural protein 3 (NSP3) mRNA gc (1-1946)(D737G_S1808F)
aggagaaagcuuaccauggcccccaccaaggugaccuucggcgacgacaccgucaucgaggugcagggguacaagagcgugaacaucaccuucgagcuggacgagcgcaucgacaagguccucaacgagaagugcuccgccuacaccguggagcugggcaccgaggugaacgaguucgcgugcgucguggccgacgccgugaucaagacgcugcagccggucagcgagcuccugacgccccuggggaucgaccucgacgagugguccauggccaccuacuaccuguucgacgagagcggcgaguucaagcuggccucccacauguacugcagcuucuacccgcccgacgaggacgaggaggagggggacugcgaggaggaggaguucgagcccuccacccaguacgaguacggcacggaggacgacuaccagggcaagccccucgaguucggggcgaccagcgccgcccugcagcccgaggaggagcaggaggaggacuggcuggacgacgacucccagcagaccgugggccagcaggacgggagcgaggacaaccagaccacgaccauccagaccaucguggagguccagccccagcucgagauggagcugaccccgguggugcagacgaucgaggucaacuccuucagcggcuaccugaagcucaccgacaacguguacaucaagaacgccgacaucguggaggaggcgaagaaggucaagcccaccgugguggucaacgccgccaacguguaccugaagcacgggggcggcguggccggggcccugaacaaggcgaccaacaacgccaugcaggucgaguccgacgacuacaucgccacgaacggcccccucaaggucgggggcagcugcgugcuguccggccacaaccuggccaagcacugccuccacgugguggggcccaacgucaacaagggcgaggacauccagcugcucaagagcgccuacgagaacuucaaccagcacgaggugcugcuggcgccgcugcucuccgccgggaucuucggcgccgaccccauccacagccugcgggugugcgucgacaccgugcgcaccaacguguaccuggccgucuucgacaagaaccucuacgacaagcugguguccagcuuccuggagaugaaguccgagaagcaggucgagcagaagaucgccgagauccccaaggaggaggugaagcccuucaucaccgagagcaagccgagcguggagcagcggaagcaggacgacaagaagaucaaggcgugcguggaggaggucacgaccacccucgaggagaccaaguuccugacggagaaccugcuccuguacaucgacaucaacgggaaccugcaccccgacuccgccacccucgugagcgacaucgacaucaccuuccugaagaaggacgcccccuacaucgugggcgacgucgugcaggagggcgugcugaccgccgucgugauccccacgaagaaggccgggggcaccaccgagaugcucgcgaaggcccugcgcaaggugccgaccgacaacuacaucacgaccuaccccgggcagggccugaacggguacaccgucgaggaggccaagaccgugcucaagaagugcaaguccgccuucuacauccugcccagcaucaucuccaacgagaagcaggagauccugggcaccgugagcuggaaccugcgggagaugcucgcgcacgccgaggagacgcgcaagcugaugcccgucugcguggagaccaaggccaucguguccaccauccagcggaaguacaagggcaucaagauccaggagggggucguggacuacggcgcccgcuucuacuucuacaccagcaagacgaccguggccucccugaucaacacccucaacgaccugaacgagacccuggucacgaugccgcucggguacgugacccacggccugaaccuggaggaggcggcccgguacaugcgcagccucaaggugcccgccaccgucuccgugagcucccccgacgccgugaccgccuacaacggguaccugacgagcuccagcaagacccccgaggagcacuucaucgagaccaucucccuggcgggcagcuacaaggacuggagcuacuccggccagagcacccagcucgggaucgaguuccugaagcggggcgacaaguccgucuacuacacgagcaacccgaccaccuuccaccuggacggggaggugaucaccuucggcaaccucaagacgcugcugucccuccgcgaggugcggaccaucaaggucuucaccaccguggacaacaucaaccugcacacccagguggucgacaugagcaugaccuacggccagcaguucggccccaccuaccuggacggggccgacgugaccaagaucaagccccacaacucccacgagggcaagacguucuacgugcucccgaacgacgacacccugcgcgucgaggccuucgaguacuaccacaccaccgaccccagcuuccuggggcgguacauguccgcccucaaccacacgaagaaguggaaguacccccaggugaacggccugaccagcaucaagugggccgacaacaacugcuaccuggcgaccgcccuccugacccugcagcagaucgagcucaaguucaacccgcccgcccugcaggacgccuacuaccgcgcgcgggccggggaggccgccaacuucugcgcccugauccucgcguacugcaacaagacggugggcgagcugggcgacguccgcgagaccauguccuaccuguuccagcacgccaaccucgacagcugcaagcgggugcugaacgucgugugcaagaccugcgggcagcagcagaccacccugaagggcguggaggccgucauguacauggggacgcucuccuacgagcaguucaagaagggcgugcagauccccugcacgugcgggaagcaggccaccaaguaccuggugcagcaggagagccccuucgucaugauguccgcgcccccggcccaguacgagcugaagcacggcaccuucacgugcgccagcgaguacaccggcaacuaccagugcgggcacuacaagcacaucaccuccaaggagacccucuacugcaucgacggcgcccugcugaccaagagcagcgaguacaaggggcccaucaccgacguguucuacaaggagaacuccuacaccaccacgaucaagcccgugaccuacaagcucgacggcgucgugugcaccgagaucgaccccaagcuggacaacuacuacaagaaggacaacagcuacuucaccgagcagccgaucgaccuggugcccaaccagcccuaccccaacgccuccuucgacaacuucaaguucgucugcgacaacaucaaguucgccgacgaccucaaccagcugacgggguacaagaagccggcgagccgcgagcugaaggugaccuucuuccccgaccucaacggcgacguggucgccaucgacuacaagcacuacacccccuccuucaagaagggcgccaagcugcugcacaagcccaucguguggcacgugaacaacgccaccaacaaggcgacguacaagccgaacaccuggugcauccggugccucuggagcaccaagcccgucgagaccuccaacagcuucgacgugcugaaguccgaggacgcccaggggauggacaaccuggccugcgaggaccucaagcccgugagcgaggaggucguggagaaccccacgauccagaaggacgugcuggagugcaacgucaagaccaccgagguggugggcgacaucauccugaagccggccaacaacucccucaagaucaccgaggaggucgggcacacggaccugauggccgcguacguggacaacagcucccugaccaucaagaagcccaacgagcucagccgcgugcugggccugaagacccucgccacccacgggcuggccgccgucaacuccgugcccugggacacgaucgccaacuacgcgaagccguuccugaacaagguggucagcaccaccaccaacaucgugacgcgcugccucaaccgggugugcaccaacuacaugcccuacuucuucacccugcugcuccagcugugcaccuucacgcgcuccaccaacagccggaucaaggccuccaugcccaccaccaucgccaagaacaccgucaagagcgugggcaaguucugccuggaggccagcuucaacuaccucaagucccccaacuucagcaagcugaucaacaucaucaucugguuccugcuccuguccgugugccugggcagccucaucuacuccacggccgcgcuggggguccugaugagcaaccucggcaugccguccuacugcaccggguaccgcgagggcuaccugaacagcaccaacgugaccaucgccacguacugcaccggcuccauccccugcagcgugugccuguccgggcucgacagccuggacaccuaccccucccuggagaccauccagaucacgaucagcuccuucaagugggaccucaccgccuucggccuggucgccgagugguuccuggccuacauccucuucacccgguucuucuacgugcuggggcuggcggccaucaugcagcuguucuucagcuacuucgccgugcacuucaucuccaacagcuggcucauguggcugaucaucaaccugguccagauggcccccaucuccgcgauggugcgcauguacaucuucuucgccagcuucuacuacguguggaaguccuacguccacgugguggacggcugcaacagcagcacgugcaugaugugcuacaagcggaaccgcgccacgcgggucgagugcaccaccaucgugaacgggguccgccgguccuucuacguguacgccaacggcggcaagggguucugcaagcuccacaacuggaacugcgugaacugcgacaccuucugcgccggcagcacguucaucuccgacgaggucgcgcgcgaccugagccugcaguucaagcggccgaucaaccccaccgaccaguccagcuacaucguggacuccgugaccgucaagaacgggagcauccaccucuacuucgacaaggccggccagaagaccuacgagcgccacucccugagccacuucgugaaccuggacaaccuccgggccaacaacacgaaggggucccugcccaucaacgugaucgucuucgacggcaagagcaagugcgaggaguccagcgccaaguccgccagcguguacuacucccagcugaugugccagcccauccuccugcuggaccaggcgcucgugagcgacgucggcgacagcgccgagguggccgugaagauguucgacgccuacgucaacaccuucuccagcaccuucaacgugccgauggagaagcugaagacccugguggccacggcggaggccgagcucgccaagaacgucuuccuggacaacgugcugagcaccuucaucuccgccgcgcgccagggguucguggacagcgacgucgagaccaaggacgugguggagugccucaagcugucccaccagagcgacaucgaggucaccggcgacuccugcaacaacuacaugcugacguacaacaagguggagaacaugacgccccgggaccucggggccugcaucgacugcagcgcccgccacaucaacgcccagguggccaagucccacaacaucgcgcugaucuggaacgucaaggacuucaugagccuguccgagcagcuccggaagcagauccgcagcgccgccaagaagaacaaccugcccuucaagcugaccugcgccaccacccgccagguggugaacgucgugaccaccaagaucgcccucaagggcgggugaggacuaguuauaagacugacuagcccgaugggccucccaacgggcccuccuccccuccuugcaccgagauuaauaaaaaaaaaaaaaaaaaaaaaaaaaaaaaaaaaaaaaaaaaaaaaaaaaaaaaaaaaaaaaaaaugcaucccccccccccccccccccccccccccccccaaaggcucuuuucagagccaccagaauu

SEQ ID NO: 28456 - RNA, 6058 nt, Artificial Sequence
  SARS-CoV-2/Wuhan-Hu-1__NC_045512.2/MN908947.2__non-structural protein 3 (NSP3) mRNA gc (1-1946)(T750I)
aggagaaagcuuaccauggcccccaccaaggugaccuucggcgacgacaccgucaucgaggugcagggguacaagagcgugaacaucaccuucgagcuggacgagcgcaucgacaagguccucaacgagaagugcuccgccuacaccguggagcugggcaccgaggugaacgaguucgcgugcgucguggccgacgccgugaucaagacgcugcagccggucagcgagcuccugacgccccuggggaucgaccucgacgagugguccauggccaccuacuaccuguucgacgagagcggcgaguucaagcuggccucccacauguacugcagcuucuacccgcccgacgaggacgaggaggagggggacugcgaggaggaggaguucgagcccuccacccaguacgaguacggcacggaggacgacuaccagggcaagccccucgaguucggggcgaccagcgccgcccugcagcccgaggaggagcaggaggaggacuggcuggacgacgacucccagcagaccgugggccagcaggacgggagcgaggacaaccagaccacgaccauccagaccaucguggagguccagccccagcucgagauggagcugaccccgguggugcagacgaucgaggucaacuccuucagcggcuaccugaagcucaccgacaacguguacaucaagaacgccgacaucguggaggaggcgaagaaggucaagcccaccgugguggucaacgccgccaacguguaccugaagcacgggggcggcguggccggggcccugaacaaggcgaccaacaacgccaugcaggucgaguccgacgacuacaucgccacgaacggcccccucaaggucgggggcagcugcgugcuguccggccacaaccuggccaagcacugccuccacgugguggggcccaacgucaacaagggcgaggacauccagcugcucaagagcgccuacgagaacuucaaccagcacgaggugcugcuggcgccgcugcucuccgccgggaucuucggcgccgaccccauccacagccugcgggugugcgucgacaccgugcgcaccaacguguaccuggccgucuucgacaagaaccucuacgacaagcugguguccagcuuccuggagaugaaguccgagaagcaggucgagcagaagaucgccgagauccccaaggaggaggugaagcccuucaucaccgagagcaagccgagcguggagcagcggaagcaggacgacaagaagaucaaggcgugcguggaggaggucacgaccacccucgaggagaccaaguuccugacggagaaccugcuccuguacaucgacaucaacgggaaccugcaccccgacuccgccacccucgugagcgacaucgacaucaccuuccugaagaaggacgcccccuacaucgugggcgacgucgugcaggagggcgugcugaccgccgucgugauccccacgaagaaggccgggggcaccaccgagaugcucgcgaaggcccugcgcaaggugccgaccgacaacuacaucacgaccuaccccgggcagggccugaacggguacaccgucgaggaggccaagaccgugcucaagaagugcaaguccgccuucuacauccugcccagcaucaucuccaacgagaagcaggagauccugggcaccgugagcuggaaccugcgggagaugcucgcgcacgccgaggagacgcgcaagcugaugcccgucugcguggagaccaaggccaucguguccaccauccagcggaaguacaagggcaucaagauccaggagggggucguggacuacggcgcccgcuucuacuucuacaccagcaagacgaccguggccucccugaucaacacccucaacgaccugaacgagacccuggucacgaugccgcucggguacgugacccacggccugaaccuggaggaggcggcccgguacaugcgcagccucaaggugcccgccaccgucuccgugagcucccccgacgccgugaccgccuacaacggguaccugacgagcuccagcaagacccccgaggagcacuucaucgagaccaucucccuggcgggcagcuacaaggacuggagcuacuccggccagagcacccagcucgggaucgaguuccugaagcggggcgacaaguccgucuacuacacgagcaacccgaccaccuuccaccuggacggggaggugaucaccuucgacaaccucaagacgcugcugucccuccgcgaggugcggaucaucaaggucuucaccaccguggacaacaucaaccugcacacccagguggucgacaugagcaugaccuacggccagcaguucggccccaccuaccuggacggggccgacgugaccaagaucaagccccacaacucccacgagggcaagacguucuacgugcucccgaacgacgacacccugcgcgucgaggccuucgaguacuaccacaccaccgaccccagcuuccuggggcgguacauguccgcccucaaccacacgaagaaguggaaguacccccaggugaacggccugaccagcaucaagugggccgacaacaacugcuaccuggcgaccgcccuccugacccugcagcagaucgagcucaaguucaacccgcccgcccugcaggacgccuacuaccgcgcgcgggccggggaggccgccaacuucugcgcccugauccucgcguacugcaacaagacggugggcgagcugggcgacguccgcgagaccauguccuaccuguuccagcacgccaaccucgacagcugcaagcgggugcugaacgucgugugcaagaccugcgggcagcagcagaccacccugaagggcguggaggccgucauguacauggggacgcucuccuacgagcaguucaagaagggcgugcagauccccugcacgugcgggaagcaggccaccaaguaccuggugcagcaggagagccccuucgucaugauguccgcgcccccggcccaguacgagcugaagcacggcaccuucacgugcgccagcgaguacaccggcaacuaccagugcgggcacuacaagcacaucaccuccaaggagacccucuacugcaucgacggcgcccugcugaccaagagcagcgaguacaaggggcccaucaccgacguguucuacaaggagaacuccuacaccaccacgaucaagcccgugaccuacaagcucgacggcgucgugugcaccgagaucgaccccaagcuggacaacuacuacaagaaggacaacagcuacuucaccgagcagccgaucgaccuggugcccaaccagcccuaccccaacgccuccuucgacaacuucaaguucgucugcgacaacaucaaguucgccgacgaccucaaccagcugacgggguacaagaagccggcgagccgcgagcugaaggugaccuucuuccccgaccucaacggcgacguggucgccaucgacuacaagcacuacacccccuccuucaagaagggcgccaagcugcugcacaagcccaucguguggcacgugaacaacgccaccaacaaggcgacguacaagccgaacaccuggugcauccggugccucuggagcaccaagcccgucgagaccuccaacagcuucgacgugcugaaguccgaggacgcccaggggauggacaaccuggccugcgaggaccucaagcccgugagcgaggaggucguggagaaccccacgauccagaaggacgugcuggagugcaacgucaagaccaccgagguggugggcgacaucauccugaagccggccaacaacucccucaagaucaccgaggaggucgggcacacggaccugauggccgcguacguggacaacagcucccugaccaucaagaagcccaacgagcucagccgcgugcugggccugaagacccucgccacccacgggcuggccgccgucaacuccgugcccugggacacgaucgccaacuacgcgaagccguuccugaacaagguggucagcaccaccaccaacaucgugacgcgcugccucaaccgggugugcaccaacuacaugcccuacuucuucacccugcugcuccagcugugcaccuucacgcgcuccaccaacagccggaucaaggccuccaugcccaccaccaucgccaagaacaccgucaagagcgugggcaaguucugccuggaggccagcuucaacuaccucaagucccccaacuucagcaagcugaucaacaucaucaucugguuccugcuccuguccgugugccugggcagccucaucuacuccacggccgcgcuggggguccugaugagcaaccucggcaugccguccuacugcaccggguaccgcgagggcuaccugaacagcaccaacgugaccaucgccacguacugcaccggcuccauccccugcagcgugugccuguccgggcucgacagccuggacaccuaccccucccuggagaccauccagaucacgaucagcuccuucaagugggaccucaccgccuucggccuggucgccgagugguuccuggccuacauccucuucacccgguucuucuacgugcuggggcuggcggccaucaugcagcuguucuucagcuacuucgccgugcacuucaucuccaacagcuggcucauguggcugaucaucaaccugguccagauggcccccaucuccgcgauggugcgcauguacaucuucuucgccagcuucuacuacguguggaaguccuacguccacgugguggacggcugcaacagcagcacgugcaugaugugcuacaagcggaaccgcgccacgcgggucgagugcaccaccaucgugaacgggguccgccgguccuucuacguguacgccaacggcggcaagggguucugcaagcuccacaacuggaacugcgugaacugcgacaccuucugcgccggcagcacguucaucuccgacgaggucgcgcgcgaccugagccugcaguucaagcggccgaucaaccccaccgaccaguccagcuacaucguggacuccgugaccgucaagaacgggagcauccaccucuacuucgacaaggccggccagaagaccuacgagcgccacucccugagccacuucgugaaccuggacaaccuccgggccaacaacacgaaggggucccugcccaucaacgugaucgucuucgacggcaagagcaagugcgaggaguccagcgccaaguccgccagcguguacuacucccagcugaugugccagcccauccuccugcuggaccaggcgcucgugagcgacgucggcgacagcgccgagguggccgugaagauguucgacgccuacgucaacaccuucuccagcaccuucaacgugccgauggagaagcugaagacccugguggccacggcggaggccgagcucgccaagaacgucucccuggacaacgugcugagcaccuucaucuccgccgcgcgccagggguucguggacagcgacgucgagaccaaggacgugguggagugccucaagcugucccaccagagcgacaucgaggucaccggcgacuccugcaacaacuacaugcugacguacaacaagguggagaacaugacgccccgggaccucggggccugcaucgacugcagcgcccgccacaucaacgcccagguggccaagucccacaacaucgcgcugaucuggaacgucaaggacuucaugagccuguccgagcagcuccggaagcagauccgcagcgccgccaagaagaacaaccugcccuucaagcugaccugcgccaccacccgccagguggugaacgucgugaccaccaagaucgcccucaagggcgggugaggacuaguuauaagacugacuagcccgaugggccucccaacgggcccuccuccccuccuugcaccgagauuaauaaaaaaaaaaaaaaaaaaaaaaaaaaaaaaaaaaaaaaaaaaaaaaaaaaaaaaaaaaaaaaaaugcaucccccccccccccccccccccccccccccccaaaggcucuuuucagagccaccagaauu

SEQ ID NO: 28457 - RNA, 6058 nt, Artificial Sequence
  SARS-CoV-2/Wuhan-Hu-1__NC_045512.2/MN908947.2__non-structural protein 3 (NSP3) mRNA gc (1-1946)(T1190I)
aggagaaagcuuaccauggcccccaccaaggugaccuucggcgacgacaccgucaucgaggugcagggguacaagagcgugaacaucaccuucgagcuggacgagcgcaucgacaagguccucaacgagaagugcuccgccuacaccguggagcugggcaccgaggugaacgaguucgcgugcgucguggccgacgccgugaucaagacgcugcagccggucagcgagcuccugacgccccuggggaucgaccucgacgagugguccauggccaccuacuaccuguucgacgagagcggcgaguucaagcuggccucccacauguacugcagcuucuacccgcccgacgaggacgaggaggagggggacugcgaggaggaggaguucgagcccuccacccaguacgaguacggcacggaggacgacuaccagggcaagccccucgaguucggggcgaccagcgccgcccugcagcccgaggaggagcaggaggaggacuggcuggacgacgacucccagcagaccgugggccagcaggacgggagcgaggacaaccagaccacgaccauccagaccaucguggagguccagccccagcucgagauggagcugaccccgguggugcagacgaucgaggucaacuccuucagcggcuaccugaagcucaccgacaacguguacaucaagaacgccgacaucguggaggaggcgaagaaggucaagcccaccgugguggucaacgccgccaacguguaccugaagcacgggggcggcguggccggggcccugaacaaggcgaccaacaacgccaugcaggucgaguccgacgacuacaucgccacgaacggcccccucaaggucgggggcagcugcgugcuguccggccacaaccuggccaagcacugccuccacgugguggggcccaacgucaacaagggcgaggacauccagcugcucaagagcgccuacgagaacuucaaccagcacgaggugcugcuggcgccgcugcucuccgccgggaucuucggcgccgaccccauccacagccugcgggugugcgucgacaccgugcgcaccaacguguaccuggccgucuucgacaagaaccucuacgacaagcugguguccagcuuccuggagaugaaguccgagaagcaggucgagcagaagaucgccgagauccccaaggaggaggugaagcccuucaucaccgagagcaagccgagcguggagcagcggaagcaggacgacaagaagaucaaggcgugcguggaggaggucacgaccacccucgaggagaccaaguuccugacggagaaccugcuccuguacaucgacaucaacgggaaccugcaccccgacuccgccacccucgugagcgacaucgacaucaccuuccugaagaaggacgcccccuacaucgugggcgacgucgugcaggagggcgugcugaccgccgucgugauccccacgaagaaggccgggggcaccaccgagaugcucgcgaaggcccugcgcaaggugccgaccgacaacuacaucacgaccuaccccgggcagggccugaacggguacaccgucgaggaggccaagaccgugcucaagaagugcaaguccgccuucuacauccugcccagcaucaucuccaacgagaagcaggagauccugggcaccgugagcuggaaccugcgggagaugcucgcgcacgccgaggagacgcgcaagcugaugcccgucugcguggagaccaaggccaucguguccaccauccagcggaaguacaagggcaucaagauccaggagggggucguggacuacggcgcccgcuucuacuucuacaccagcaagacgaccguggccucccugaucaacacccucaacgaccugaacgagacccuggucacgaugccgcucggguacgugacccacggccugaaccuggaggaggcggcccgguacaugcgcagccucaaggugcccgccaccgucuccgugagcucccccgacgccgugaccgccuacaacggguaccugacgagcuccagcaagacccccgaggagcacuucaucgagaccaucucccuggcgggcagcuacaaggacuggagcuacuccggccagagcacccagcucgggaucgaguuccugaagcggggcgacaaguccgucuacuacacgagcaacccgaccaccuuccaccuggacggggaggugaucaccuucgacaaccucaagacgcugcugucccuccgcgaggugcggaccaucaaggucuucaccaccguggacaacaucaaccugcacacccagguggucgacaugagcaugaccuacggccagcaguucggccccaccuaccuggacggggccgacgugaccaagaucaagccccacaacucccacgagggcaagacguucuacgugcucccgaacgacgacacccugcgcgucgaggccuucgaguacuaccacaccaccgaccccagcuuccuggggcgguacauguccgcccucaaccacacgaagaaguggaaguacccccaggugaacggccugaccagcaucaagugggccgacaacaacugcuaccuggcgaccgcccuccugacccugcagcagaucgagcucaaguucaacccgcccgcccugcaggacgccuacuaccgcgcgcgggccggggaggccgccaacuucugcgcccugauccucgcguacugcaacaagacggugggcgagcugggcgacguccgcgagaccauguccuaccuguuccagcacgccaaccucgacagcugcaagcgggugcugaacgucgugugcaagaccugcgggcagcagcagaccacccugaagggcguggaggccgucauguacauggggacgcucuccuacgagcaguucaagaagggcgugcagauccccugcacgugcgggaagcaggccaccaaguaccuggugcagcaggagagccccuucgucaugauguccgcgcccccggcccaguacgagcugaagcacggcaccuucacgugcgccagcgaguacaccggcaacuaccagugcgggcacuacaagcacaucaccuccaaggagacccucuacugcaucgacggcgcccugcugaccaagagcagcgaguacaaggggcccaucaccgacguguucuacaaggagaacuccuacaccaccacgaucaagcccgugaccuacaagcucgacggcgucgugugcaccgagaucgaccccaagcuggacaacuacuacaagaaggacaacagcuacuucaccgagcagccgaucgaccuggugcccaaccagcccuaccccaacgccuccuucgacaacuucaaguucgucugcgacaacaucaaguucgccgacgaccucaaccagcugacgggguacaagaagccggcgagccgcgagcugaaggugaccuucuuccccgaccucaacggcgacguggucgccaucgacuacaagcacuacacccccuccuucaagaagggcgccaagcugcugcacaagcccaucguguggcacgugaacaacgccaccaacaaggcgacguacaagccgaacaucuggugcauccggugccucuggagcaccaagcccgucgagaccuccaacagcuucgacgugcugaaguccgaggacgcccaggggauggacaaccuggccugcgaggaccucaagcccgugagcgaggaggucguggagaaccccacgauccagaaggacgugcuggagugcaacgucaagaccaccgagguggugggcgacaucauccugaagccggccaacaacucccucaagaucaccgaggaggucgggcacacggaccugauggccgcguacguggacaacagcucccugaccaucaagaagcccaacgagcucagccgcgugcugggccugaagacccucgccacccacgggcuggccgccgucaacuccgugcccugggacacgaucgccaacuacgcgaagccguuccugaacaagguggucagcaccaccaccaacaucgugacgcgcugccucaaccgggugugcaccaacuacaugcccuacuucuucacccugcugcuccagcugugcaccuucacgcgcuccaccaacagccggaucaaggccuccaugcccaccaccaucgccaagaacaccgucaagagcgugggcaaguucugccuggaggccagcuucaacuaccucaagucccccaacuucagcaagcugaucaacaucaucaucugguuccugcuccuguccgugugccugggcagccucaucuacuccacggccgcgcuggggguccugaugagcaaccucggcaugccguccuacugcaccggguaccgcgagggcuaccugaacagcaccaacgugaccaucgccacguacugcaccggcuccauccccugcagcgugugccuguccgggcucgacagccuggacaccuaccccucccuggagaccauccagaucacgaucagcuccuucaagugggaccucaccgccuucggccuggucgccgagugguuccuggccuacauccucuucacccgguucuucuacgugcuggggcuggcggccaucaugcagcuguucuucagcuacuucgccgugcacuucaucuccaacagcuggcucauguggcugaucaucaaccugguccagauggcccccaucuccgcgauggugcgcauguacaucuucuucgccagcuucuacuacguguggaaguccuacguccacgugguggacggcugcaacagcagcacgugcaugaugugcuacaagcggaaccgcgccacgcgggucgagugcaccaccaucgugaacgggguccgccgguccuucuacguguacgccaacggcggcaagggguucugcaagcuccacaacuggaacugcgugaacugcgacaccuucugcgccggcagcacguucaucuccgacgaggucgcgcgcgaccugagccugcaguucaagcggccgaucaaccccaccgaccaguccagcuacaucguggacuccgugaccgucaagaacgggagcauccaccucuacuucgacaaggccggccagaagaccuacgagcgccacucccugagccacuucgugaaccuggacaaccuccgggccaacaacacgaaggggucccugcccaucaacgugaucgucuucgacggcaagagcaagugcgaggaguccagcgccaaguccgccagcguguacuacucccagcugaugugccagcccauccuccugcuggaccaggcgcucgugagcgacgucggcgacagcgccgagguggccgugaagauguucgacgccuacgucaacaccuucuccagcaccuucaacgugccgauggagaagcugaagacccugguggccacggcggaggccgagcucgccaagaacgucucccuggacaacgugcugagcaccuucaucuccgccgcgcgccagggguucguggacagcgacgucgagaccaaggacgugguggagugccucaagcugucccaccagagcgacaucgaggucaccggcgacuccugcaacaacuacaugcugacguacaacaagguggagaacaugacgccccgggaccucggggccugcaucgacugcagcgcccgccacaucaacgcccagguggccaagucccacaacaucgcgcugaucuggaacgucaaggacuucaugagccuguccgagcagcuccggaagcagauccgcagcgccgccaagaagaacaaccugcccuucaagcugaccugcgccaccacccgccagguggugaacgucgugaccaccaagaucgcccucaagggcgggugaggacuaguuauaagacugacuagcccgaugggccucccaacgggcccuccuccccuccuugcaccgagauuaauaaaaaaaaaaaaaaaaaaaaaaaaaaaaaaaaaaaaaaaaaaaaaaaaaaaaaaaaaaaaaaaaugcaucccccccccccccccccccccccccccccccaaaggcucuuuucagagccaccagaauu

SEQ ID NO: 28458 - RNA, 6058 nt, Artificial Sequence
  SARS-CoV-2/Wuhan-Hu-1__NC_045512.2/MN908947.2__non-structural protein 3 (NSP3) mRNA gc (1-1946)(A1527V_T1831I)
aggagaaagcuuaccauggcccccaccaaggugaccuucggcgacgacaccgucaucgaggugcagggguacaagagcgugaacaucaccuucgagcuggacgagcgcaucgacaagguccucaacgagaagugcuccgccuacaccguggagcugggcaccgaggugaacgaguucgcgugcgucguggccgacgccgugaucaagacgcugcagccggucagcgagcuccugacgccccuggggaucgaccucgacgagugguccauggccaccuacuaccuguucgacgagagcggcgaguucaagcuggccucccacauguacugcagcuucuacccgcccgacgaggacgaggaggagggggacugcgaggaggaggaguucgagcccuccacccaguacgaguacggcacggaggacgacuaccagggcaagccccucgaguucggggcgaccagcgccgcccugcagcccgaggaggagcaggaggaggacuggcuggacgacgacucccagcagaccgugggccagcaggacgggagcgaggacaaccagaccacgaccauccagaccaucguggagguccagccccagcucgagauggagcugaccccgguggugcagacgaucgaggucaacuccuucagcggcuaccugaagcucaccgacaacguguacaucaagaacgccgacaucguggaggaggcgaagaaggucaagcccaccgugguggucaacgccgccaacguguaccugaagcacgggggcggcguggccggggcccugaacaaggcgaccaacaacgccaugcaggucgaguccgacgacuacaucgccacgaacggcccccucaaggucgggggcagcugcgugcuguccggccacaaccuggccaagcacugccuccacgugguggggcccaacgucaacaagggcgaggacauccagcugcucaagagcgccuacgagaacuucaaccagcacgaggugcugcuggcgccgcugcucuccgccgggaucuucggcgccgaccccauccacagccugcgggugugcgucgacaccgugcgcaccaacguguaccuggccgucuucgacaagaaccucuacgacaagcugguguccagcuuccuggagaugaaguccgagaagcaggucgagcagaagaucgccgagauccccaaggaggaggugaagcccuucaucaccgagagcaagccgagcguggagcagcggaagcaggacgacaagaagaucaaggcgugcguggaggaggucacgaccacccucgaggagaccaaguuccugacggagaaccugcuccuguacaucgacaucaacgggaaccugcaccccgacuccgccacccucgugagcgacaucgacaucaccuuccugaagaaggacgcccccuacaucgugggcgacgucgugcaggagggcgugcugaccgccgucgugauccccacgaagaaggccgggggcaccaccgagaugcucgcgaaggcccugcgcaaggugccgaccgacaacuacaucacgaccuaccccgggcagggccugaacggguacaccgucgaggaggccaagaccgugcucaagaagugcaaguccgccuucuacauccugcccagcaucaucuccaacgagaagcaggagauccugggcaccgugagcuggaaccugcgggagaugcucgcgcacgccgaggagacgcgcaagcugaugcccgucugcguggagaccaaggccaucguguccaccauccagcggaaguacaagggcaucaagauccaggagggggucguggacuacggcgcccgcuucuacuucuacaccagcaagacgaccguggccucccugaucaacacccucaacgaccugaacgagacccuggucacgaugccgcucggguacgugacccacggccugaaccuggaggaggcggcccgguacaugcgcagccucaaggugcccgccaccgucuccgugagcucccccgacgccgugaccgccuacaacggguaccugacgagcuccagcaagacccccgaggagcacuucaucgagaccaucucccuggcgggcagcuacaaggacuggagcuacuccggccagagcacccagcucgggaucgaguuccugaagcggggcgacaaguccgucuacuacacgagcaacccgaccaccuuccaccuggacggggaggugaucaccuucgacaaccucaagacgcugcugucccuccgcgaggugcggaccaucaaggucuucaccaccguggacaacaucaaccugcacacccagguggucgacaugagcaugaccuacggccagcaguucggccccaccuaccuggacggggccgacgugaccaagaucaagccccacaacucccacgagggcaagacguucuacgugcucccgaacgacgacacccugcgcgucgaggccuucgaguacuaccacaccaccgaccccagcuuccuggggcgguacauguccgcccucaaccacacgaagaaguggaaguacccccaggugaacggccugaccagcaucaagugggccgacaacaacugcuaccuggcgaccgcccuccugacccugcagcagaucgagcucaaguucaacccgcccgcccugcaggacgccuacuaccgcgcgcgggccggggaggccgccaacuucugcgcccugauccucgcguacugcaacaagacggugggcgagcugggcgacguccgcgagaccauguccuaccuguuccagcacgccaaccucgacagcugcaagcgggugcugaacgucgugugcaagaccugcgggcagcagcagaccacccugaagggcguggaggccgucauguacauggggacgcucuccuacgagcaguucaagaagggcgugcagauccccugcacgugcgggaagcaggccaccaaguaccuggugcagcaggagagccccuucgucaugauguccgcgcccccggcccaguacgagcugaagcacggcaccuucacgugcgccagcgaguacaccggcaacuaccagugcgggcacuacaagcacaucaccuccaaggagacccucuacugcaucgacggcgcccugcugaccaagagcagcgaguacaaggggcccaucaccgacguguucuacaaggagaacuccuacaccaccacgaucaagcccgugaccuacaagcucgacggcgucgugugcaccgagaucgaccccaagcuggacaacuacuacaagaaggacaacagcuacuucaccgagcagccgaucgaccuggugcccaaccagcccuaccccaacgccuccuucgacaacuucaaguucgucugcgacaacaucaaguucgccgacgaccucaaccagcugacgggguacaagaagccggcgagccgcgagcugaaggugaccuucuuccccgaccucaacggcgacguggucgccaucgacuacaagcacuacacccccuccuucaagaagggcgccaagcugcugcacaagcccaucguguggcacgugaacaacgccaccaacaaggcgacguacaagccgaacaccuggugcauccggugccucuggagcaccaagcccgucgagaccuccaacagcuucgacgugcugaaguccgaggacgcccaggggauggacaaccuggccugcgaggaccucaagcccgugagcgaggaggucguggagaaccccacgauccagaaggacgugcuggagugcaacgucaagaccaccgagguggugggcgacaucauccugaagccggccaacaacucccucaagaucaccgaggaggucgggcacacggaccugauggccgcguacguggacaacagcucccugaccaucaagaagcccaacgagcucagccgcgugcugggccugaagacccucgccacccacgggcuggccgccgucaacuccgugcccugggacacgaucgccaacuacgcgaagccguuccugaacaagguggucagcaccaccaccaacaucgugacgcgcugccucaaccgggugugcaccaacuacaugcccuacuucuucacccugcugcuccagcugugcaccuucacgcgcuccaccaacagccggaucaaggccuccaugcccaccaccaucgccaagaacaccgucaagagcgugggcaaguucugccuggaggccagcuucaacuaccucaagucccccaacuucagcaagcugaucaacaucaucaucugguuccugcuccuguccgugugccugggcagccucaucuacuccacggccgcgcuggggguccugaugagcaaccucggcaugccguccuacugcaccggguaccgcgagggcuaccugaacagcaccaacgugaccaucgccacguacugcaccggcuccauccccugcagcgugugccuguccgggcucgacagccuggacaccuaccccucccuggagaccauccagaucacgaucagcuccuucaagugggaccucaccgccuucggccuggucgccgagugguuccuggccuacauccucuucacccgguucuucuacgugcuggggcugguggccaucaugcagcuguucuucagcuacuucgccgugcacuucaucuccaacagcuggcucauguggcugaucaucaaccugguccagauggcccccaucuccgcgauggugcgcauguacaucuucuucgccagcuucuacuacguguggaaguccuacguccacgugguggacggcugcaacagcagcacgugcaugaugugcuacaagcggaaccgcgccacgcgggucgagugcaccaccaucgugaacgggguccgccgguccuucuacguguacgccaacggcggcaagggguucugcaagcuccacaacuggaacugcgugaacugcgacaccuucugcgccggcagcacguucaucuccgacgaggucgcgcgcgaccugagccugcaguucaagcggccgaucaaccccaccgaccaguccagcuacaucguggacuccgugaccgucaagaacgggagcauccaccucuacuucgacaaggccggccagaagaccuacgagcgccacucccugagccacuucgugaaccuggacaaccuccgggccaacaacacgaaggggucccugcccaucaacgugaucgucuucgacggcaagagcaagugcgaggaguccagcgccaaguccgccagcguguacuacucccagcugaugugccagcccauccuccugcuggaccaggcgcucgugagcgacgucggcgacagcgccgagguggccgugaagauguucgacgccuacgucaacaccuucuccagcaccuucaacgugccgauggagaagcugaagacccugguggccacggcggaggccgagcucgccaagaacgucucccuggacaacgugcugagcaccuucaucuccgccgcgcgccagggguucguggacagcgacgucgagaucaaggacgugguggagugccucaagcugucccaccagagcgacaucgaggucaccggcgacuccugcaacaacuacaugcugacguacaacaagguggagaacaugacgccccgggaccucggggccugcaucgacugcagcgcccgccacaucaacgcccagguggccaagucccacaacaucgcgcugaucuggaacgucaaggacuucaugagccuguccgagcagcuccggaagcagauccgcagcgccgccaagaagaacaaccugcccuucaagcugaccugcgccaccacccgccagguggugaacgucgugaccaccaagaucgcccucaagggcgggugaggacuaguuauaagacugacuagcccgaugggccucccaacgggcccuccuccccuccuugcaccgagauuaauaaaaaaaaaaaaaaaaaaaaaaaaaaaaaaaaaaaaaaaaaaaaaaaaaaaaaaaaaaaaaaaaugcaucccccccccccccccccccccccccccccccaaaggcucuuuucagagccaccagaauu

SEQ ID NO: 28459 - RNA, 6058 nt, Artificial Sequence
  SARS-CoV-2/Wuhan-Hu-1__NC_045512.2/MN908947.2__non-structural protein 3 (NSP3) mRNA gc (1-1946)(A86V_A656V_I1022V_E1847D)
aggagaaagcuuaccauggcccccaccaaggugaccuucggcgacgacaccgucaucgaggugcagggguacaagagcgugaacaucaccuucgagcuggacgagcgcaucgacaagguccucaacgagaagugcuccgccuacaccguggagcugggcaccgaggugaacgaguucgcgugcgucguggccgacgccgugaucaagacgcugcagccggucagcgagcuccugacgccccuggggaucgaccucgacgagugguccauggugaccuacuaccuguucgacgagagcggcgaguucaagcuggccucccacauguacugcagcuucuacccgcccgacgaggacgaggaggagggggacugcgaggaggaggaguucgagcccuccacccaguacgaguacggcacggaggacgacuaccagggcaagccccucgaguucggggcgaccagcgccgcccugcagcccgaggaggagcaggaggaggacuggcuggacgacgacucccagcagaccgugggccagcaggacgggagcgaggacaaccagaccacgaccauccagaccaucguggagguccagccccagcucgagauggagcugaccccgguggugcagacgaucgaggucaacuccuucagcggcuaccugaagcucaccgacaacguguacaucaagaacgccgacaucguggaggaggcgaagaaggucaagcccaccgugguggucaacgccgccaacguguaccugaagcacgggggcggcguggccggggcccugaacaaggcgaccaacaacgccaugcaggucgaguccgacgacuacaucgccacgaacggcccccucaaggucgggggcagcugcgugcuguccggccacaaccuggccaagcacugccuccacgugguggggcccaacgucaacaagggcgaggacauccagcugcucaagagcgccuacgagaacuucaaccagcacgaggugcugcuggcgccgcugcucuccgccgggaucuucggcgccgaccccauccacagccugcgggugugcgucgacaccgugcgcaccaacguguaccuggccgucuucgacaagaaccucuacgacaagcugguguccagcuuccuggagaugaaguccgagaagcaggucgagcagaagaucgccgagauccccaaggaggaggugaagcccuucaucaccgagagcaagccgagcguggagcagcggaagcaggacgacaagaagaucaaggcgugcguggaggaggucacgaccacccucgaggagaccaaguuccugacggagaaccugcuccuguacaucgacaucaacgggaaccugcaccccgacuccgccacccucgugagcgacaucgacaucaccuuccugaagaaggacgcccccuacaucgugggcgacgucgugcaggagggcgugcugaccgccgucgugauccccacgaagaaggccgggggcaccaccgagaugcucgcgaaggcccugcgcaaggugccgaccgacaacuacaucacgaccuaccccgggcagggccugaacggguacaccgucgaggaggccaagaccgugcucaagaagugcaaguccgccuucuacauccugcccagcaucaucuccaacgagaagcaggagauccugggcaccgugagcuggaaccugcgggagaugcucgcgcacgccgaggagacgcgcaagcugaugcccgucugcguggagaccaaggccaucguguccaccauccagcggaaguacaagggcaucaagauccaggagggggucguggacuacggcgcccgcuucuacuucuacaccagcaagacgaccguggccucccugaucaacacccucaacgaccugaacgagacccuggucacgaugccgcucggguacgugacccacggccugaaccuggaggaggcggcccgguacaugcgcagccucaaggugcccgugaccgucuccgugagcucccccgacgccgugaccgccuacaacggguaccugacgagcuccagcaagacccccgaggagcacuucaucgagaccaucucccuggcgggcagcuacaaggacuggagcuacuccggccagagcacccagcucgggaucgaguuccugaagcggggcgacaaguccgucuacuacacgagcaacccgaccaccuuccaccuggacggggaggugaucaccuucgacaaccucaagacgcugcugucccuccgcgaggugcggaccaucaaggucuucaccaccguggacaacaucaaccugcacacccagguggucgacaugagcaugaccuacggccagcaguucggccccaccuaccuggacggggccgacgugaccaagaucaagccccacaacucccacgagggcaagacguucuacgugcucccgaacgacgacacccugcgcgucgaggccuucgaguacuaccacaccaccgaccccagcuuccuggggcgguacauguccgcccucaaccacacgaagaaguggaaguacccccaggugaacggccugaccagcaucaagugggccgacaacaacugcuaccuggcgaccgcccuccugacccugcagcagaucgagcucaaguucaacccgcccgcccugcaggacgccuacuaccgcgcgcgggccggggaggccgccaacuucugcgcccugauccucgcguacugcaacaagacggugggcgagcugggcgacguccgcgagaccauguccuaccuguuccagcacgccaaccucgacagcugcaagcgggugcugaacgucgugugcaagaccugcgggcagcagcagaccacccugaagggcguggaggccgucauguacauggggacgcucuccuacgagcaguucaagaagggcgugcagauccccugcacgugcgggaagcaggccaccaaguaccuggugcagcaggagagccccuucgucaugauguccgcgcccccggcccaguacgagcugaagcacggcaccuucacgugcgccagcgaguacaccggcaacuaccagugcgggcacuacaagcacgugaccuccaaggagacccucuacugcaucgacggcgcccugcugaccaagagcagcgaguacaaggggcccaucaccgacguguucuacaaggagaacuccuacaccaccacgaucaagcccgugaccuacaagcucgacggcgucgugugcaccgagaucgaccccaagcuggacaacuacuacaagaaggacaacagcuacuucaccgagcagccgaucgaccuggugcccaaccagcccuaccccaacgccuccuucgacaacuucaaguucgucugcgacaacaucaaguucgccgacgaccucaaccagcugacgggguacaagaagccggcgagccgcgagcugaaggugaccuucuuccccgaccucaacggcgacguggucgccaucgacuacaagcacuacacccccuccuucaagaagggcgccaagcugcugcacaagcccaucguguggcacgugaacaacgccaccaacaaggcgacguacaagccgaacaccuggugcauccggugccucuggagcaccaagcccgucgagaccuccaacagcuucgacgugcugaaguccgaggacgcccaggggauggacaaccuggccugcgaggaccucaagcccgugagcgaggaggucguggagaaccccacgauccagaaggacgugcuggagugcaacgucaagaccaccgagguggugggcgacaucauccugaagccggccaacaacucccucaagaucaccgaggaggucgggcacacggaccugauggccgcguacguggacaacagcucccugaccaucaagaagcccaacgagcucagccgcgugcugggccugaagacccucgccacccacgggcuggccgccgucaacuccgugcccugggacacgaucgccaacuacgcgaagccguuccugaacaagguggucagcaccaccaccaacaucgugacgcgcugccucaaccgggugugcaccaacuacaugcccuacuucuucacccugcugcuccagcugugcaccuucacgcgcuccaccaacagccggaucaaggccuccaugcccaccaccaucgccaagaacaccgucaagagcgugggcaaguucugccuggaggccagcuucaacuaccucaagucccccaacuucagcaagcugaucaacaucaucaucugguuccugcuccuguccgugugccugggcagccucaucuacuccacggccgcgcuggggguccugaugagcaaccucggcaugccguccuacugcaccggguaccgcgagggcuaccugaacagcaccaacgugaccaucgccacguacugcaccggcuccauccccugcagcgugugccuguccgggcucgacagccuggacaccuaccccucccuggagaccauccagaucacgaucagcuccuucaagugggaccucaccgccuucggccuggucgccgagugguuccuggccuacauccucuucacccgguucuucuacgugcuggggcuggcggccaucaugcagcuguucuucagcuacuucgccgugcacuucaucuccaacagcuggcucauguggcugaucaucaaccugguccagauggcccccaucuccgcgauggugcgcauguacaucuucuucgccagcuucuacuacguguggaaguccuacguccacgugguggacggcugcaacagcagcacgugcaugaugugcuacaagcggaaccgcgccacgcgggucgagugcaccaccaucgugaacgggguccgccgguccuucuacguguacgccaacggcggcaagggguucugcaagcuccacaacuggaacugcgugaacugcgacaccuucugcgccggcagcacguucaucuccgacgaggucgcgcgcgaccugagccugcaguucaagcggccgaucaaccccaccgaccaguccagcuacaucguggacuccgugaccgucaagaacgggagcauccaccucuacuucgacaaggccggccagaagaccuacgagcgccacucccugagccacuucgugaaccuggacaaccuccgggccaacaacacgaaggggucccugcccaucaacgugaucgucuucgacggcaagagcaagugcgaggaguccagcgccaaguccgccagcguguacuacucccagcugaugugccagcccauccuccugcuggaccaggcgcucgugagcgacgucggcgacagcgccgagguggccgugaagauguucgacgccuacgucaacaccuucuccagcaccuucaacgugccgauggagaagcugaagacccugguggccacggcggaggccgagcucgccaagaacgucucccuggacaacgugcugagcaccuucaucuccgccgcgcgccagggguucguggacagcgacgucgagaccaaggacgugguggagugccucaagcugucccaccagagcgacaucgacgucaccggcgacuccugcaacaacuacaugcugacguacaacaagguggagaacaugacgccccgggaccucggggccugcaucgacugcagcgcccgccacaucaacgcccagguggccaagucccacaacaucgcgcugaucuggaacgucaaggacuucaugagccuguccgagcagcuccggaagcagauccgcagcgccgccaagaagaacaaccugcccuucaagcugaccugcgccaccacccgccagguggugaacgucgugaccaccaagaucgcccucaagggcgggugaggacuaguuauaagacugacuagcccgaugggccucccaacgggcccuccuccccuccuugcaccgagauuaauaaaaaaaaaaaaaaaaaaaaaaaaaaaaaaaaaaaaaaaaaaaaaaaaaaaaaaaaaaaaaaaaugcaucccccccccccccccccccccccccccccccaaaggcucuuuucagagccaccagaauu

SEQ ID NO: 28460 - RNA, 6058 nt, Artificial Sequence
  SARS-CoV-2/Wuhan-Hu-1__NC_045512.2/MN908947.2__non-structural protein 3 (NSP3) mRNA gc (1-1946)(D136N_E379V_K1694N)
aggagaaagcuuaccauggcccccaccaaggugaccuucggcgacgacaccgucaucgaggugcagggguacaagagcgugaacaucaccuucgagcuggacgagcgcaucgacaagguccucaacgagaagugcuccgccuacaccguggagcugggcaccgaggugaacgaguucgcgugcgucguggccgacgccgugaucaagacgcugcagccggucagcgagcuccugacgccccuggggaucgaccucgacgagugguccauggccaccuacuaccuguucgacgagagcggcgaguucaagcuggccucccacauguacugcagcuucuacccgcccgacgaggacgaggaggagggggacugcgaggaggaggaguucgagcccuccacccaguacgaguacggcacggagaacgacuaccagggcaagccccucgaguucggggcgaccagcgccgcccugcagcccgaggaggagcaggaggaggacuggcuggacgacgacucccagcagaccgugggccagcaggacgggagcgaggacaaccagaccacgaccauccagaccaucguggagguccagccccagcucgagauggagcugaccccgguggugcagacgaucgaggucaacuccuucagcggcuaccugaagcucaccgacaacguguacaucaagaacgccgacaucguggaggaggcgaagaaggucaagcccaccgugguggucaacgccgccaacguguaccugaagcacgggggcggcguggccggggcccugaacaaggcgaccaacaacgccaugcaggucgaguccgacgacuacaucgccacgaacggcccccucaaggucgggggcagcugcgugcuguccggccacaaccuggccaagcacugccuccacgugguggggcccaacgucaacaagggcgaggacauccagcugcucaagagcgccuacgagaacuucaaccagcacgaggugcugcuggcgccgcugcucuccgccgggaucuucggcgccgaccccauccacagccugcgggugugcgucgacaccgugcgcaccaacguguaccuggccgucuucgacaagaaccucuacgacaagcugguguccagcuuccuggagaugaaguccgugaagcaggucgagcagaagaucgccgagauccccaaggaggaggugaagcccuucaucaccgagagcaagccgagcguggagcagcggaagcaggacgacaagaagaucaaggcgugcguggaggaggucacgaccacccucgaggagaccaaguuccugacggagaaccugcuccuguacaucgacaucaacgggaaccugcaccccgacuccgccacccucgugagcgacaucgacaucaccuuccugaagaaggacgcccccuacaucgugggcgacgucgugcaggagggcgugcugaccgccgucgugauccccacgaagaaggccgggggcaccaccgagaugcucgcgaaggcccugcgcaaggugccgaccgacaacuacaucacgaccuaccccgggcagggccugaacggguacaccgucgaggaggccaagaccgugcucaagaagugcaaguccgccuucuacauccugcccagcaucaucuccaacgagaagcaggagauccugggcaccgugagcuggaaccugcgggagaugcucgcgcacgccgaggagacgcgcaagcugaugcccgucugcguggagaccaaggccaucguguccaccauccagcggaaguacaagggcaucaagauccaggagggggucguggacuacggcgcccgcuucuacuucuacaccagcaagacgaccguggccucccugaucaacacccucaacgaccugaacgagacccuggucacgaugccgcucggguacgugacccacggccugaaccuggaggaggcggcccgguacaugcgcagccucaaggugcccgccaccgucuccgugagcucccccgacgccgugaccgccuacaacggguaccugacgagcuccagcaagacccccgaggagcacuucaucgagaccaucucccuggcgggcagcuacaaggacuggagcuacuccggccagagcacccagcucgggaucgaguuccugaagcggggcgacaaguccgucuacuacacgagcaacccgaccaccuuccaccuggacggggaggugaucaccuucgacaaccucaagacgcugcugucccuccgcgaggugcggaccaucaaggucuucaccaccguggacaacaucaaccugcacacccagguggucgacaugagcaugaccuacggccagcaguucggccccaccuaccuggacggggccgacgugaccaagaucaagccccacaacucccacgagggcaagacguucuacgugcucccgaacgacgacacccugcgcgucgaggccuucgaguacuaccacaccaccgaccccagcuuccuggggcgguacauguccgcccucaaccacacgaagaaguggaaguacccccaggugaacggccugaccagcaucaagugggccgacaacaacugcuaccuggcgaccgcccuccugacccugcagcagaucgagcucaaguucaacccgcccgcccugcaggacgccuacuaccgcgcgcgggccggggaggccgccaacuucugcgcccugauccucgcguacugcaacaagacggugggcgagcugggcgacguccgcgagaccauguccuaccuguuccagcacgccaaccucgacagcugcaagcgggugcugaacgucgugugcaagaccugcgggcagcagcagaccacccugaagggcguggaggccgucauguacauggggacgcucuccuacgagcaguucaagaagggcgugcagauccccugcacgugcgggaagcaggccaccaaguaccuggugcagcaggagagccccuucgucaugauguccgcgcccccggcccaguacgagcugaagcacggcaccuucacgugcgccagcgaguacaccggcaacuaccagugcgggcacuacaagcacaucaccuccaaggagacccucuacugcaucgacggcgcccugcugaccaagagcagcgaguacaaggggcccaucaccgacguguucuacaaggagaacuccuacaccaccacgaucaagcccgugaccuacaagcucgacggcgucgugugcaccgagaucgaccccaagcuggacaacuacuacaagaaggacaacagcuacuucaccgagcagccgaucgaccuggugcccaaccagcccuaccccaacgccuccuucgacaacuucaaguucgucugcgacaacaucaaguucgccgacgaccucaaccagcugacgggguacaagaagccggcgagccgcgagcugaaggugaccuucuuccccgaccucaacggcgacguggucgccaucgacuacaagcacuacacccccuccuucaagaagggcgccaagcugcugcacaagcccaucguguggcacgugaacaacgccaccaacaaggcgacguacaagccgaacaccuggugcauccggugccucuggagcaccaagcccgucgagaccuccaacagcuucgacgugcugaaguccgaggacgcccaggggauggacaaccuggccugcgaggaccucaagcccgugagcgaggaggucguggagaaccccacgauccagaaggacgugcuggagugcaacgucaagaccaccgagguggugggcgacaucauccugaagccggccaacaacucccucaagaucaccgaggaggucgggcacacggaccugauggccgcguacguggacaacagcucccugaccaucaagaagcccaacgagcucagccgcgugcugggccugaagacccucgccacccacgggcuggccgccgucaacuccgugcccugggacacgaucgccaacuacgcgaagccguuccugaacaagguggucagcaccaccaccaacaucgugacgcgcugccucaaccgggugugcaccaacuacaugcccuacuucuucacccugcugcuccagcugugcaccuucacgcgcuccaccaacagccggaucaaggccuccaugcccaccaccaucgccaagaacaccgucaagagcgugggcaaguucugccuggaggccagcuucaacuaccucaagucccccaacuucagcaagcugaucaacaucaucaucugguuccugcuccuguccgugugccugggcagccucaucuacuccacggccgcgcuggggguccugaugagcaaccucggcaugccguccuacugcaccggguaccgcgagggcuaccugaacagcaccaacgugaccaucgccacguacugcaccggcuccauccccugcagcgugugccuguccgggcucgacagccuggacaccuaccccucccuggagaccauccagaucacgaucagcuccuucaagugggaccucaccgccuucggccuggucgccgagugguuccuggccuacauccucuucacccgguucuucuacgugcuggggcuggcggccaucaugcagcuguucuucagcuacuucgccgugcacuucaucuccaacagcuggcucauguggcugaucaucaaccugguccagauggcccccaucuccgcgauggugcgcauguacaucuucuucgccagcuucuacuacguguggaaguccuacguccacgugguggacggcugcaacagcagcacgugcaugaugugcuacaagcggaaccgcgccacgcgggucgagugcaccaccaucgugaacgggguccgccgguccuucuacguguacgccaacggcggcaagggguucugcaagcuccacaacuggaacugcgugaacugcgacaccuucugcgccggcagcacguucaucuccgacgaggucgcgcgcgaccugagccugcaguucaagcggccgaucaaccccaccgaccaguccagcuacaucguggacuccgugaccgucaagaacgggagcauccaccucuacuucgacaaggccggccagaacaccuacgagcgccacucccugagccacuucgugaaccuggacaaccuccgggccaacaacacgaaggggucccugcccaucaacgugaucgucuucgacggcaagagcaagugcgaggaguccagcgccaaguccgccagcguguacuacucccagcugaugugccagcccauccuccugcuggaccaggcgcucgugagcgacgucggcgacagcgccgagguggccgugaagauguucgacgccuacgucaacaccuucuccagcaccuucaacgugccgauggagaagcugaagacccugguggccacggcggaggccgagcucgccaagaacgucucccuggacaacgugcugagcaccuucaucuccgccgcgcgccagggguucguggacagcgacgucgagaccaaggacgugguggagugccucaagcugucccaccagagcgacaucgaggucaccggcgacuccugcaacaacuacaugcugacguacaacaagguggagaacaugacgccccgggaccucggggccugcaucgacugcagcgcccgccacaucaacgcccagguggccaagucccacaacaucgcgcugaucuggaacgucaaggacuucaugagccuguccgagcagcuccggaagcagauccgcagcgccgccaagaagaacaaccugcccuucaagcugaccugcgccaccacccgccagguggugaacgucgugaccaccaagaucgcccucaagggcgggugaggacuaguuauaagacugacuagcccgaugggccucccaacgggcccuccuccccuccuugcaccgagauuaauaaaaaaaaaaaaaaaaaaaaaaaaaaaaaaaaaaaaaaaaaaaaaaaaaaaaaaaaaaaaaaaaugcaucccccccccccccccccccccccccccccccaaaggcucuuuucagagccaccagaauu

SEQ ID NO: 28461 - RNA, 6058 nt, Artificial Sequence
  SARS-CoV-2/Wuhan-Hu-1__NC_045512.2/MN908947.2__non-structural protein 3 (NSP3) mRNA gc (1-1946)(A862S_G1129S)
aggagaaagcuuaccauggcccccaccaaggugaccuucggcgacgacaccgucaucgaggugcagggguacaagagcgugaacaucaccuucgagcuggacgagcgcaucgacaagguccucaacgagaagugcuccgccuacaccguggagcugggcaccgaggugaacgaguucgcgugcgucguggccgacgccgugaucaagacgcugcagccggucagcgagcuccugacgccccuggggaucgaccucgacgagugguccauggccaccuacuaccuguucgacgagagcggcgaguucaagcuggccucccacauguacugcagcuucuacccgcccgacgaggacgaggaggagggggacugcgaggaggaggaguucgagcccuccacccaguacgaguacggcacggaggacgacuaccagggcaagccccucgaguucggggcgaccagcgccgcccugcagcccgaggaggagcaggaggaggacuggcuggacgacgacucccagcagaccgugggccagcaggacgggagcgaggacaaccagaccacgaccauccagaccaucguggagguccagccccagcucgagauggagcugaccccgguggugcagacgaucgaggucaacuccuucagcggcuaccugaagcucaccgacaacguguacaucaagaacgccgacaucguggaggaggcgaagaaggucaagcccaccgugguggucaacgccgccaacguguaccugaagcacgggggcggcguggccggggcccugaacaaggcgaccaacaacgccaugcaggucgaguccgacgacuacaucgccacgaacggcccccucaaggucgggggcagcugcgugcuguccggccacaaccuggccaagcacugccuccacgugguggggcccaacgucaacaagggcgaggacauccagcugcucaagagcgccuacgagaacuucaaccagcacgaggugcugcuggcgccgcugcucuccgccgggaucuucggcgccgaccccauccacagccugcgggugugcgucgacaccgugcgcaccaacguguaccuggccgucuucgacaagaaccucuacgacaagcugguguccagcuuccuggagaugaaguccgagaagcaggucgagcagaagaucgccgagauccccaaggaggaggugaagcccuucaucaccgagagcaagccgagcguggagcagcggaagcaggacgacaagaagaucaaggcgugcguggaggaggucacgaccacccucgaggagaccaaguuccugacggagaaccugcuccuguacaucgacaucaacgggaaccugcaccccgacuccgccacccucgugagcgacaucgacaucaccuuccugaagaaggacgcccccuacaucgugggcgacgucgugcaggagggcgugcugaccgccgucgugauccccacgaagaaggccgggggcaccaccgagaugcucgcgaaggcccugcgcaaggugccgaccgacaacuacaucacgaccuaccccgggcagggccugaacggguacaccgucgaggaggccaagaccgugcucaagaagugcaaguccgccuucuacauccugcccagcaucaucuccaacgagaagcaggagauccugggcaccgugagcuggaaccugcgggagaugcucgcgcacgccgaggagacgcgcaagcugaugcccgucugcguggagaccaaggccaucguguccaccauccagcggaaguacaagggcaucaagauccaggagggggucguggacuacggcgcccgcuucuacuucuacaccagcaagacgaccguggccucccugaucaacacccucaacgaccugaacgagacccuggucacgaugccgcucggguacgugacccacggccugaaccuggaggaggcggcccgguacaugcgcagccucaaggugcccgccaccgucuccgugagcucccccgacgccgugaccgccuacaacggguaccugacgagcuccagcaagacccccgaggagcacuucaucgagaccaucucccuggcgggcagcuacaaggacuggagcuacuccggccagagcacccagcucgggaucgaguuccugaagcggggcgacaaguccgucuacuacacgagcaacccgaccaccuuccaccuggacggggaggugaucaccuucgacaaccucaagacgcugcugucccuccgcgaggugcggaccaucaaggucuucaccaccguggacaacaucaaccugcacacccagguggucgacaugagcaugaccuacggccagcaguucggccccaccuaccuggacggggccgacgugaccaagaucaagccccacaacucccacgagggcaagacguucuacgugcucccgaacgacgacacccugcgcgucgaggccuucgaguacuaccacaccaccgaccccagcuuccuggggcgguacauguccgcccucaaccacacgaagaaguggaaguacccccaggugaacggccugaccagcaucaagugggccgacaacaacugcuaccuggcgaccagccuccugacccugcagcagaucgagcucaaguucaacccgcccgcccugcaggacgccuacuaccgcgcgcgggccggggaggccgccaacuucugcgcccugauccucgcguacugcaacaagacggugggcgagcugggcgacguccgcgagaccauguccuaccuguuccagcacgccaaccucgacagcugcaagcgggugcugaacgucgugugcaagaccugcgggcagcagcagaccacccugaagggcguggaggccgucauguacauggggacgcucuccuacgagcaguucaagaagggcgugcagauccccugcacgugcgggaagcaggccaccaaguaccuggugcagcaggagagccccuucgucaugauguccgcgcccccggcccaguacgagcugaagcacggcaccuucacgugcgccagcgaguacaccggcaacuaccagugcgggcacuacaagcacaucaccuccaaggagacccucuacugcaucgacggcgcccugcugaccaagagcagcgaguacaaggggcccaucaccgacguguucuacaaggagaacuccuacaccaccacgaucaagcccgugaccuacaagcucgacggcgucgugugcaccgagaucgaccccaagcuggacaacuacuacaagaaggacaacagcuacuucaccgagcagccgaucgaccuggugcccaaccagcccuaccccaacgccuccuucgacaacuucaaguucgucugcgacaacaucaaguucgccgacgaccucaaccagcugacgagcuacaagaagccggcgagccgcgagcugaaggugaccuucuuccccgaccucaacggcgacguggucgccaucgacuacaagcacuacacccccuccuucaagaagggcgccaagcugcugcacaagcccaucguguggcacgugaacaacgccaccaacaaggcgacguacaagccgaacaccuggugcauccggugccucuggagcaccaagcccgucgagaccuccaacagcuucgacgugcugaaguccgaggacgcccaggggauggacaaccuggccugcgaggaccucaagcccgugagcgaggaggucguggagaaccccacgauccagaaggacgugcuggagugcaacgucaagaccaccgagguggugggcgacaucauccugaagccggccaacaacucccucaagaucaccgaggaggucgggcacacggaccugauggccgcguacguggacaacagcucccugaccaucaagaagcccaacgagcucagccgcgugcugggccugaagacccucgccacccacgggcuggccgccgucaacuccgugcccugggacacgaucgccaacuacgcgaagccguuccugaacaagguggucagcaccaccaccaacaucgugacgcgcugccucaaccgggugugcaccaacuacaugcccuacuucuucacccugcugcuccagcugugcaccuucacgcgcuccaccaacagccggaucaaggccuccaugcccaccaccaucgccaagaacaccgucaagagcgugggcaaguucugccuggaggccagcuucaacuaccucaagucccccaacuucagcaagcugaucaacaucaucaucugguuccugcuccuguccgugugccugggcagccucaucuacuccacggccgcgcuggggguccugaugagcaaccucggcaugccguccuacugcaccggguaccgcgagggcuaccugaacagcaccaacgugaccaucgccacguacugcaccggcuccauccccugcagcgugugccuguccgggcucgacagccuggacaccuaccccucccuggagaccauccagaucacgaucagcuccuucaagugggaccucaccgccuucggccuggucgccgagugguuccuggccuacauccucuucacccgguucuucuacgugcuggggcuggcggccaucaugcagcuguucuucagcuacuucgccgugcacuucaucuccaacagcuggcucauguggcugaucaucaaccugguccagauggcccccaucuccgcgauggugcgcauguacaucuucuucgccagcuucuacuacguguggaaguccuacguccacgugguggacggcugcaacagcagcacgugcaugaugugcuacaagcggaaccgcgccacgcgggucgagugcaccaccaucgugaacgggguccgccgguccuucuacguguacgccaacggcggcaagggguucugcaagcuccacaacuggaacugcgugaacugcgacaccuucugcgccggcagcacguucaucuccgacgaggucgcgcgcgaccugagccugcaguucaagcggccgaucaaccccaccgaccaguccagcuacaucguggacuccgugaccgucaagaacgggagcauccaccucuacuucgacaaggccggccagaagaccuacgagcgccacucccugagccacuucgugaaccuggacaaccuccgggccaacaacacgaaggggucccugcccaucaacgugaucgucuucgacggcaagagcaagugcgaggaguccagcgccaaguccgccagcguguacuacucccagcugaugugccagcccauccuccugcuggaccaggcgcucgugagcgacgucggcgacagcgccgagguggccgugaagauguucgacgccuacgucaacaccuucuccagcaccuucaacgugccgauggagaagcugaagacccugguggccacggcggaggccgagcucgccaagaacgucucccuggacaacgugcugagcaccuucaucuccgccgcgcgccagggguucguggacagcgacgucgagaccaaggacgugguggagugccucaagcugucccaccagagcgacaucgaggucaccggcgacuccugcaacaacuacaugcugacguacaacaagguggagaacaugacgccccgggaccucggggccugcaucgacugcagcgcccgccacaucaacgcccagguggccaagucccacaacaucgcgcugaucuggaacgucaaggacuucaugagccuguccgagcagcuccggaagcagauccgcagcgccgccaagaagaacaaccugcccuucaagcugaccugcgccaccacccgccagguggugaacgucgugaccaccaagaucgcccucaagggcgggugaggacuaguuauaagacugacuagcccgaugggccucccaacgggcccuccuccccuccuugcaccgagauuaauaaaaaaaaaaaaaaaaaaaaaaaaaaaaaaaaaaaaaaaaaaaaaaaaaaaaaaaaaaaaaaaaugcaucccccccccccccccccccccccccccccccaaaggcucuuuucagagccaccagaauu

SEQ ID NO: 28462 - RNA, 6058 nt, Artificial Sequence
  SARS-CoV-2/Wuhan-Hu-1__NC_045512.2/MN908947.2__non-structural protein 3 (NSP3) mRNA gc (1-1946)(T1190I_K1772R)
aggagaaagcuuaccauggcccccaccaaggugaccuucggcgacgacaccgucaucgaggugcagggguacaagagcgugaacaucaccuucgagcuggacgagcgcaucgacaagguccucaacgagaagugcuccgccuacaccguggagcugggcaccgaggugaacgaguucgcgugcgucguggccgacgccgugaucaagacgcugcagccggucagcgagcuccugacgccccuggggaucgaccucgacgagugguccauggccaccuacuaccuguucgacgagagcggcgaguucaagcuggccucccacauguacugcagcuucuacccgcccgacgaggacgaggaggagggggacugcgaggaggaggaguucgagcccuccacccaguacgaguacggcacggaggacgacuaccagggcaagccccucgaguucggggcgaccagcgccgcccugcagcccgaggaggagcaggaggaggacuggcuggacgacgacucccagcagaccgugggccagcaggacgggagcgaggacaaccagaccacgaccauccagaccaucguggagguccagccccagcucgagauggagcugaccccgguggugcagacgaucgaggucaacuccuucagcggcuaccugaagcucaccgacaacguguacaucaagaacgccgacaucguggaggaggcgaagaaggucaagcccaccgugguggucaacgccgccaacguguaccugaagcacgggggcggcguggccggggcccugaacaaggcgaccaacaacgccaugcaggucgaguccgacgacuacaucgccacgaacggcccccucaaggucgggggcagcugcgugcuguccggccacaaccuggccaagcacugccuccacgugguggggcccaacgucaacaagggcgaggacauccagcugcucaagagcgccuacgagaacuucaaccagcacgaggugcugcuggcgccgcugcucuccgccgggaucuucggcgccgaccccauccacagccugcgggugugcgucgacaccgugcgcaccaacguguaccuggccgucuucgacaagaaccucuacgacaagcugguguccagcuuccuggagaugaaguccgagaagcaggucgagcagaagaucgccgagauccccaaggaggaggugaagcccuucaucaccgagagcaagccgagcguggagcagcggaagcaggacgacaagaagaucaaggcgugcguggaggaggucacgaccacccucgaggagaccaaguuccugacggagaaccugcuccuguacaucgacaucaacgggaaccugcaccccgacuccgccacccucgugagcgacaucgacaucaccuuccugaagaaggacgcccccuacaucgugggcgacgucgugcaggagggcgugcugaccgccgucgugauccccacgaagaaggccgggggcaccaccgagaugcucgcgaaggcccugcgcaaggugccgaccgacaacuacaucacgaccuaccccgggcagggccugaacggguacaccgucgaggaggccaagaccgugcucaagaagugcaaguccgccuucuacauccugcccagcaucaucuccaacgagaagcaggagauccugggcaccgugagcuggaaccugcgggagaugcucgcgcacgccgaggagacgcgcaagcugaugcccgucugcguggagaccaaggccaucguguccaccauccagcggaaguacaagggcaucaagauccaggagggggucguggacuacggcgcccgcuucuacuucuacaccagcaagacgaccguggccucccugaucaacacccucaacgaccugaacgagacccuggucacgaugccgcucggguacgugacccacggccugaaccuggaggaggcggcccgguacaugcgcagccucaaggugcccgccaccgucuccgugagcucccccgacgccgugaccgccuacaacggguaccugacgagcuccagcaagacccccgaggagcacuucaucgagaccaucucccuggcgggcagcuacaaggacuggagcuacuccggccagagcacccagcucgggaucgaguuccugaagcggggcgacaaguccgucuacuacacgagcaacccgaccaccuuccaccuggacggggaggugaucaccuucgacaaccucaagacgcugcugucccuccgcgaggugcggaccaucaaggucuucaccaccguggacaacaucaaccugcacacccagguggucgacaugagcaugaccuacggccagcaguucggccccaccuaccuggacggggccgacgugaccaagaucaagccccacaacucccacgagggcaagacguucuacgugcucccgaacgacgacacccugcgcgucgaggccuucgaguacuaccacaccaccgaccccagcuuccuggggcgguacauguccgcccucaaccacacgaagaaguggaaguacccccaggugaacggccugaccagcaucaagugggccgacaacaacugcuaccuggcgaccgcccuccugacccugcagcagaucgagcucaaguucaacccgcccgcccugcaggacgccuacuaccgcgcgcgggccggggaggccgccaacuucugcgcccugauccucgcguacugcaacaagacggugggcgagcugggcgacguccgcgagaccauguccuaccuguuccagcacgccaaccucgacagcugcaagcgggugcugaacgucgugugcaagaccugcgggcagcagcagaccacccugaagggcguggaggccgucauguacauggggacgcucuccuacgagcaguucaagaagggcgugcagauccccugcacgugcgggaagcaggccaccaaguaccuggugcagcaggagagccccuucgucaugauguccgcgcccccggcccaguacgagcugaagcacggcaccuucacgugcgccagcgaguacaccggcaacuaccagugcgggcacuacaagcacaucaccuccaaggagacccucuacugcaucgacggcgcccugcugaccaagagcagcgaguacaaggggcccaucaccgacguguucuacaaggagaacuccuacaccaccacgaucaagcccgugaccuacaagcucgacggcgucgugugcaccgagaucgaccccaagcuggacaacuacuacaagaaggacaacagcuacuucaccgagcagccgaucgaccuggugcccaaccagcccuaccccaacgccuccuucgacaacuucaaguucgucugcgacaacaucaaguucgccgacgaccucaaccagcugacgggguacaagaagccggcgagccgcgagcugaaggugaccuucuuccccgaccucaacggcgacguggucgccaucgacuacaagcacuacacccccuccuucaagaagggcgccaagcugcugcacaagcccaucguguggcacgugaacaacgccaccaacaaggcgacguacaagccgaacaucuggugcauccggugccucuggagcaccaagcccgucgagaccuccaacagcuucgacgugcugaaguccgaggacgcccaggggauggacaaccuggccugcgaggaccucaagcccgugagcgaggaggucguggagaaccccacgauccagaaggacgugcuggagugcaacgucaagaccaccgagguggugggcgacaucauccugaagccggccaacaacucccucaagaucaccgaggaggucgggcacacggaccugauggccgcguacguggacaacagcucccugaccaucaagaagcccaacgagcucagccgcgugcugggccugaagacccucgccacccacgggcuggccgccgucaacuccgugcccugggacacgaucgccaacuacgcgaagccguuccugaacaagguggucagcaccaccaccaacaucgugacgcgcugccucaaccgggugugcaccaacuacaugcccuacuucuucacccugcugcuccagcugugcaccuucacgcgcuccaccaacagccggaucaaggccuccaugcccaccaccaucgccaagaacaccgucaagagcgugggcaaguucugccuggaggccagcuucaacuaccucaagucccccaacuucagcaagcugaucaacaucaucaucugguuccugcuccuguccgugugccugggcagccucaucuacuccacggccgcgcuggggguccugaugagcaaccucggcaugccguccuacugcaccggguaccgcgagggcuaccugaacagcaccaacgugaccaucgccacguacugcaccggcuccauccccugcagcgugugccuguccgggcucgacagccuggacaccuaccccucccuggagaccauccagaucacgaucagcuccuucaagugggaccucaccgccuucggccuggucgccgagugguuccuggccuacauccucuucacccgguucuucuacgugcuggggcuggcggccaucaugcagcuguucuucagcuacuucgccgugcacuucaucuccaacagcuggcucauguggcugaucaucaaccugguccagauggcccccaucuccgcgauggugcgcauguacaucuucuucgccagcuucuacuacguguggaaguccuacguccacgugguggacggcugcaacagcagcacgugcaugaugugcuacaagcggaaccgcgccacgcgggucgagugcaccaccaucgugaacgggguccgccgguccuucuacguguacgccaacggcggcaagggguucugcaagcuccacaacuggaacugcgugaacugcgacaccuucugcgccggcagcacguucaucuccgacgaggucgcgcgcgaccugagccugcaguucaagcggccgaucaaccccaccgaccaguccagcuacaucguggacuccgugaccgucaagaacgggagcauccaccucuacuucgacaaggccggccagaagaccuacgagcgccacucccugagccacuucgugaaccuggacaaccuccgggccaacaacacgaaggggucccugcccaucaacgugaucgucuucgacggcaagagcaagugcgaggaguccagcgccaaguccgccagcguguacuacucccagcugaugugccagcccauccuccugcuggaccaggcgcucgugagcgacgucggcgacagcgccgagguggccgugcgcauguucgacgccuacgucaacaccuucuccagcaccuucaacgugccgauggagaagcugaagacccugguggccacggcggaggccgagcucgccaagaacgucucccuggacaacgugcugagcaccuucaucuccgccgcgcgccagggguucguggacagcgacgucgagaccaaggacgugguggagugccucaagcugucccaccagagcgacaucgaggucaccggcgacuccugcaacaacuacaugcugacguacaacaagguggagaacaugacgccccgggaccucggggccugcaucgacugcagcgcccgccacaucaacgcccagguggccaagucccacaacaucgcgcugaucuggaacgucaaggacuucaugagccuguccgagcagcuccggaagcagauccgcagcgccgccaagaagaacaaccugcccuucaagcugaccugcgccaccacccgccagguggugaacgucgugaccaccaagaucgcccucaagggcgggugaggacuaguuauaagacugacuagcccgaugggccucccaacgggcccuccuccccuccuugcaccgagauuaauaaaaaaaaaaaaaaaaaaaaaaaaaaaaaaaaaaaaaaaaaaaaaaaaaaaaaaaaaaaaaaaaugcaucccccccccccccccccccccccccccccccaaaggcucuuuucagagccaccagaauu

SEQ ID NO: 28463 - RNA, 1723 nt, Artificial Sequence
  SARS-CoV-2/Wuhan-Hu-1__NC_045512.2/MN908947.2/EPI_ISL_402128__non -structural protein 4 (NSP4) mRNA gc (1-501)(V168L_T493I)
aggagaaagcuuaccaugaagaucgugaacaacuggcugaagcagcucaucaaggucacccugguguuccuguucguggccgccaucuucuaccucaucacccccguccacgugaugagcaagcacacggacuucuccagcgagaucaucggcuacaaggcgaucgacgggggcgugacccgcgacaucgccuccaccgacacgugcuucgccaacaagcacgccgacuucgacaccugguucagccagcggggcggcuccuacaccaacgacaaggccugcccccugaucgcggccgucaucacccgcgaggugggguucgugguccccggccugcccggcaccauccuccggacgaccaacggggacuuccugcacuuccugccccgcguguucagcgccgugggcaacaucugcuacaccccguccaagcucaucgaguacaccgacuucgccacgagcgcgugcguccuggccgccgagugcaccaucuucaaggacgccuccgggaagccccugcccuacugcuacgacaccaacgugcuggagggcagcgucgccuacgagucccuccggcccgacacccgcuacgugcugauggacgggagcaucauccaguucccgaacacguaccuggagggcuccgugcgggucgugaccaccuucgacagcgaguacugccgccacgggaccugcgagcgguccgaggcgggggugugcgucagcacguccggccgcugggugcucaacaacgacuacuaccggagccugcccgggguguucugcggcgucgacgccgugaaccugcucaccaacauguucacgccccugauccagcccaucggcgcccuggacaucuccgccagcaucgucgccgggggcaucguggcgaucguggugaccugccucgccuacuacuucaugcgcuuccggcgcgccuucggggaguacagccacgucguggccuucaacacccugcuguuccucauguccuucaccguccugugccugaccccgguguacagcuuccuccccggcguguacuccgucaucuaccuguaccugaccuucuaccucacgaacgacgugagcuuccuggcccacauccaguggauggugauguucacgccccugguccccuucuggaucaccaucgcguacaucaucugcaucuccaccaagcacuucuacugguucuucagcaacuaccucaagcggcgcgugguguucaacggggucuccuucagcaccuucgaggaggccgcccugugcaccuuccugcucaacaaggagauguaccugaagcugcgguccgacgugcuccugccgcugacccaguacaaccgcuaccucgcccuguacaacaaguacaaguacuucagcggcgccauggacaccacguccuaccgggaggcggccugcugccaccuggccaaggcccucaacgacuucagcaacuccggcagcgacgugcuguaccagccgccccagaucuccaucaccagcgcgguccugcagugaggacuaguuauaagacugacuagcccgaugggccucccaacgggcccuccuccccuccuugcaccgagauuaauaaaaaaaaaaaaaaaaaaaaaaaaaaaaaaaaaaaaaaaaaaaaaaaaaaaaaaaaaaaaaaaaugcaucccccccccccccccccccccccccccccccaaaggcucuuuucagagccaccagaauu

SEQ ID NO: 28464 - RNA, 1723 nt, Artificial Sequence
  SARS-CoV-2/Wuhan-Hu-1__NC_045512.2/MN908947.2/EPI_ISL_402128__non -structural protein 4 (NSP4) mRNA gc (1-501)(F18L)
aggagaaagcuuaccaugaagaucgugaacaacuggcugaagcagcucaucaaggucacccuggugcugcuguucguggccgccaucuucuaccucaucacccccguccacgugaugagcaagcacacggacuucuccagcgagaucaucggcuacaaggcgaucgacgggggcgugacccgcgacaucgccuccaccgacacgugcuucgccaacaagcacgccgacuucgacaccugguucagccagcggggcggcuccuacaccaacgacaaggccugcccccugaucgcggccgucaucacccgcgaggugggguucgugguccccggccugcccggcaccauccuccggacgaccaacggggacuuccugcacuuccugccccgcguguucagcgccgugggcaacaucugcuacaccccguccaagcucaucgaguacaccgacuucgccacgagcgcgugcguccuggccgccgagugcaccaucuucaaggacgccuccgggaagcccgugcccuacugcuacgacaccaacgugcuggagggcagcgucgccuacgagucccuccggcccgacacccgcuacgugcugauggacgggagcaucauccaguucccgaacacguaccuggagggcuccgugcgggucgugaccaccuucgacagcgaguacugccgccacgggaccugcgagcgguccgaggcgggggugugcgucagcacguccggccgcugggugcucaacaacgacuacuaccggagccugcccgggguguucugcggcgucgacgccgugaaccugcucaccaacauguucacgccccugauccagcccaucggcgcccuggacaucuccgccagcaucgucgccgggggcaucguggcgaucguggugaccugccucgccuacuacuucaugcgcuuccggcgcgccuucggggaguacagccacgucguggccuucaacacccugcuguuccucauguccuucaccguccugugccugaccccgguguacagcuuccuccccggcguguacuccgucaucuaccuguaccugaccuucuaccucacgaacgacgugagcuuccuggcccacauccaguggauggugauguucacgccccugguccccuucuggaucaccaucgcguacaucaucugcaucuccaccaagcacuucuacugguucuucagcaacuaccucaagcggcgcgugguguucaacggggucuccuucagcaccuucgaggaggccgcccugugcaccuuccugcucaacaaggagauguaccugaagcugcgguccgacgugcuccugccgcugacccaguacaaccgcuaccucgcccuguacaacaaguacaaguacuucagcggcgccauggacaccacguccuaccgggaggcggccugcugccaccuggccaaggcccucaacgacuucagcaacuccggcagcgacgugcuguaccagccgccccagaccuccaucaccagcgcgguccugcagugaggacuaguuauaagacugacuagcccgaugggccucccaacgggcccuccuccccuccuugcaccgagauuaauaaaaaaaaaaaaaaaaaaaaaaaaaaaaaaaaaaaaaaaaaaaaaaaaaaaaaaaaaaaaaaaaugcaucccccccccccccccccccccccccccccccaaaggcucuuuucagagccaccagaauu

SEQ ID NO: 28465 - RNA, 1723 nt, Artificial Sequence
  SARS-CoV-2/Wuhan-Hu-1__NC_045512.2/MN908947.2/EPI_ISL_402128__non -structural protein 4 (NSP4) mRNA gc (1-501)(I24T_G179S_S185N_A447V)
aggagaaagcuuaccaugaagaucgugaacaacuggcugaagcagcucaucaaggucacccugguguuccuguucguggccgccaccuucuaccucaucacccccguccacgugaugagcaagcacacggacuucuccagcgagaucaucggcuacaaggcgaucgacgggggcgugacccgcgacaucgccuccaccgacacgugcuucgccaacaagcacgccgacuucgacaccugguucagccagcggggcggcuccuacaccaacgacaaggccugcccccugaucgcggccgucaucacccgcgaggugggguucgugguccccggccugcccggcaccauccuccggacgaccaacggggacuuccugcacuuccugccccgcguguucagcgccgugggcaacaucugcuacaccccguccaagcucaucgaguacaccgacuucgccacgagcgcgugcguccuggccgccgagugcaccaucuucaaggacgccuccgggaagcccgugcccuacugcuacgacaccaacgugcuggagagcagcgucgccuacgagaaccuccggcccgacacccgcuacgugcugauggacgggagcaucauccaguucccgaacacguaccuggagggcuccgugcgggucgugaccaccuucgacagcgaguacugccgccacgggaccugcgagcgguccgaggcgggggugugcgucagcacguccggccgcugggugcucaacaacgacuacuaccggagccugcccgggguguucugcggcgucgacgccgugaaccugcucaccaacauguucacgccccugauccagcccaucggcgcccuggacaucuccgccagcaucgucgccgggggcaucguggcgaucguggugaccugccucgccuacuacuucaugcgcuuccggcgcgccuucggggaguacagccacgucguggccuucaacacccugcuguuccucauguccuucaccguccugugccugaccccgguguacagcuuccuccccggcguguacuccgucaucuaccuguaccugaccuucuaccucacgaacgacgugagcuuccuggcccacauccaguggauggugauguucacgccccugguccccuucuggaucaccaucgcguacaucaucugcaucuccaccaagcacuucuacugguucuucagcaacuaccucaagcggcgcgugguguucaacggggucuccuucagcaccuucgaggaggccgcccugugcaccuuccugcucaacaaggagauguaccugaagcugcgguccgacgugcuccugccgcugacccaguacaaccgcuaccucgugcuguacaacaaguacaaguacuucagcggcgccauggacaccacguccuaccgggaggcggccugcugccaccuggccaaggcccucaacgacuucagcaacuccggcagcgacgugcuguaccagccgccccagaccuccaucaccagcgcgguccugcagugaggacuaguuauaagacugacuagcccgaugggccucccaacgggcccuccuccccuccuugcaccgagauuaauaaaaaaaaaaaaaaaaaaaaaaaaaaaaaaaaaaaaaaaaaaaaaaaaaaaaaaaaaaaaaaaaugcaucccccccccccccccccccccccccccccccaaaggcucuuuucagagccaccagaauu

SEQ ID NO: 28466 - RNA, 1723 nt, Artificial Sequence
  SARS-CoV-2/Wuhan-Hu-1__NC_045512.2/MN908947.2/EPI_ISL_402128__non -structural protein 4 (NSP4) mRNA gc (1-501)(V168L_A447V_T493I)
aggagaaagcuuaccaugaagaucgugaacaacuggcugaagcagcucaucaaggucacccugguguuccuguucguggccgccaucuucuaccucaucacccccguccacgugaugagcaagcacacggacuucuccagcgagaucaucggcuacaaggcgaucgacgggggcgugacccgcgacaucgccuccaccgacacgugcuucgccaacaagcacgccgacuucgacaccugguucagccagcggggcggcuccuacaccaacgacaaggccugcccccugaucgcggccgucaucacccgcgaggugggguucgugguccccggccugcccggcaccauccuccggacgaccaacggggacuuccugcacuuccugccccgcguguucagcgccgugggcaacaucugcuacaccccguccaagcucaucgaguacaccgacuucgccacgagcgcgugcguccuggccgccgagugcaccaucuucaaggacgccuccgggaagccccugcccuacugcuacgacaccaacgugcuggagggcagcgucgccuacgagucccuccggcccgacacccgcuacgugcugauggacgggagcaucauccaguucccgaacacguaccuggagggcuccgugcgggucgugaccaccuucgacagcgaguacugccgccacgggaccugcgagcgguccgaggcgggggugugcgucagcacguccggccgcugggugcucaacaacgacuacuaccggagccugcccgggguguucugcggcgucgacgccgugaaccugcucaccaacauguucacgccccugauccagcccaucggcgcccuggacaucuccgccagcaucgucgccgggggcaucguggcgaucguggugaccugccucgccuacuacuucaugcgcuuccggcgcgccuucggggaguacagccacgucguggccuucaacacccugcuguuccucauguccuucaccguccugugccugaccccgguguacagcuuccuccccggcguguacuccgucaucuaccuguaccugaccuucuaccucacgaacgacgugagcuuccuggcccacauccaguggauggugauguucacgccccugguccccuucuggaucaccaucgcguacaucaucugcaucuccaccaagcacuucuacugguucuucagcaacuaccucaagcggcgcgugguguucaacggggucuccuucagcaccuucgaggaggccgcccugugcaccuuccugcucaacaaggagauguaccugaagcugcgguccgacgugcuccugccgcugacccaguacaaccgcuaccucgugcuguacaacaaguacaaguacuucagcggcgccauggacaccacguccuaccgggaggcggccugcugccaccuggccaaggcccucaacgacuucagcaacuccggcagcgacgugcuguaccagccgccccagaucuccaucaccagcgcgguccugcagugaggacuaguuauaagacugacuagcccgaugggccucccaacgggcccuccuccccuccuugcaccgagauuaauaaaaaaaaaaaaaaaaaaaaaaaaaaaaaaaaaaaaaaaaaaaaaaaaaaaaaaaaaaaaaaaaugcaucccccccccccccccccccccccccccccccaaaggcucuuuucagagccaccagaauu

SEQ ID NO: 28467 - RNA, 1723 nt, Artificial Sequence
  SARS-CoV-2/Wuhan-Hu-1__NC_045512.2/MN908947.2/EPI_ISL_402128__non -structural protein 4 (NSP4) mRNA gc (1-501)(Y206H_L265F_T296I_A473S)
aggagaaagcuuaccaugaagaucgugaacaacuggcugaagcagcucaucaaggucacccugguguuccuguucguggccgccaucuucuaccucaucacccccguccacgugaugagcaagcacacggacuucuccagcgagaucaucggcuacaaggcgaucgacgggggcgugacccgcgacaucgccuccaccgacacgugcuucgccaacaagcacgccgacuucgacaccugguucagccagcggggcggcuccuacaccaacgacaaggccugcccccugaucgcggccgucaucacccgcgaggugggguucgugguccccggccugcccggcaccauccuccggacgaccaacggggacuuccugcacuuccugccccgcguguucagcgccgugggcaacaucugcuacaccccguccaagcucaucgaguacaccgacuucgccacgagcgcgugcguccuggccgccgagugcaccaucuucaaggacgccuccgggaagcccgugcccuacugcuacgacaccaacgugcuggagggcagcgucgccuacgagucccuccggcccgacacccgcuacgugcugauggacgggagcaucauccaguucccgaacacgcaccuggagggcuccgugcgggucgugaccaccuucgacagcgaguacugccgccacgggaccugcgagcgguccgaggcgggggugugcgucagcacguccggccgcugggugcucaacaacgacuacuaccggagccugcccgggguguucugcggcgucgacgccgugaaccuguucaccaacauguucacgccccugauccagcccaucggcgcccuggacaucuccgccagcaucgucgccgggggcaucguggcgaucguggugaucugccucgccuacuacuucaugcgcuuccggcgcgccuucggggaguacagccacgucguggccuucaacacccugcuguuccucauguccuucaccguccugugccugaccccgguguacagcuuccuccccggcguguacuccgucaucuaccuguaccugaccuucuaccucacgaacgacgugagcuuccuggcccacauccaguggauggugauguucacgccccugguccccuucuggaucaccaucgcguacaucaucugcaucuccaccaagcacuucuacugguucuucagcaacuaccucaagcggcgcgugguguucaacggggucuccuucagcaccuucgaggaggccgcccugugcaccuuccugcucaacaaggagauguaccugaagcugcgguccgacgugcuccugccgcugacccaguacaaccgcuaccucgcccuguacaacaaguacaaguacuucagcggcgccauggacaccacguccuaccgggaggcggccugcugccaccugagcaaggcccucaacgacuucagcaacuccggcagcgacgugcuguaccagccgccccagaccuccaucaccagcgcgguccugcagugaggacuaguuauaagacugacuagcccgaugggccucccaacgggcccuccuccccuccuugcaccgagauuaauaaaaaaaaaaaaaaaaaaaaaaaaaaaaaaaaaaaaaaaaaaaaaaaaaaaaaaaaaaaaaaaaugcaucccccccccccccccccccccccccccccccaaaggcucuuuucagagccaccagaauu

SEQ ID NO: 28468 - RNA, 1723 nt, Artificial Sequence
  SARS-CoV-2/Wuhan-Hu-1__NC_045512.2/MN908947.2/EPI_ISL_402128__non -structural protein 4 (NSP4) mRNA gc (1-501)(T174I_A447V)
aggagaaagcuuaccaugaagaucgugaacaacuggcugaagcagcucaucaaggucacccugguguuccuguucguggccgccaucuucuaccucaucacccccguccacgugaugagcaagcacacggacuucuccagcgagaucaucggcuacaaggcgaucgacgggggcgugacccgcgacaucgccuccaccgacacgugcuucgccaacaagcacgccgacuucgacaccugguucagccagcggggcggcuccuacaccaacgacaaggccugcccccugaucgcggccgucaucacccgcgaggugggguucgugguccccggccugcccggcaccauccuccggacgaccaacggggacuuccugcacuuccugccccgcguguucagcgccgugggcaacaucugcuacaccccguccaagcucaucgaguacaccgacuucgccacgagcgcgugcguccuggccgccgagugcaccaucuucaaggacgccuccgggaagcccgugcccuacugcuacgacaucaacgugcuggagggcagcgucgccuacgagucccuccggcccgacacccgcuacgugcugauggacgggagcaucauccaguucccgaacacguaccuggagggcuccgugcgggucgugaccaccuucgacagcgaguacugccgccacgggaccugcgagcgguccgaggcgggggugugcgucagcacguccggccgcugggugcucaacaacgacuacuaccggagccugcccgggguguucugcggcgucgacgccgugaaccugcucaccaacauguucacgccccugauccagcccaucggcgcccuggacaucuccgccagcaucgucgccgggggcaucguggcgaucguggugaccugccucgccuacuacuucaugcgcuuccggcgcgccuucggggaguacagccacgucguggccuucaacacccugcuguuccucauguccuucaccguccugugccugaccccgguguacagcuuccuccccggcguguacuccgucaucuaccuguaccugaccuucuaccucacgaacgacgugagcuuccuggcccacauccaguggauggugauguucacgccccugguccccuucuggaucaccaucgcguacaucaucugcaucuccaccaagcacuucuacugguucuucagcaacuaccucaagcggcgcgugguguucaacggggucuccuucagcaccuucgaggaggccgcccugugcaccuuccugcucaacaaggagauguaccugaagcugcgguccgacgugcuccugccgcugacccaguacaaccgcuaccucgugcuguacaacaaguacaaguacuucagcggcgccauggacaccacguccuaccgggaggcggccugcugccaccuggccaaggcccucaacgacuucagcaacuccggcagcgacgugcuguaccagccgccccagaccuccaucaccagcgcgguccugcagugaggacuaguuauaagacugacuagcccgaugggccucccaacgggcccuccuccccuccuugcaccgagauuaauaaaaaaaaaaaaaaaaaaaaaaaaaaaaaaaaaaaaaaaaaaaaaaaaaaaaaaaaaaaaaaaaugcaucccccccccccccccccccccccccccccccaaaggcucuuuucagagccaccagaauu

SEQ ID NO: 28469 - RNA, 1723 nt, Artificial Sequence
  SARS-CoV-2/Wuhan-Hu-1__NC_045512.2/MN908947.2/EPI_ISL_402128__non -structural protein 4 (NSP4) mRNA gc (1-501)(T190I_T493I)
aggagaaagcuuaccaugaagaucgugaacaacuggcugaagcagcucaucaaggucacccugguguuccuguucguggccgccaucuucuaccucaucacccccguccacgugaugagcaagcacacggacuucuccagcgagaucaucggcuacaaggcgaucgacgggggcgugacccgcgacaucgccuccaccgacacgugcuucgccaacaagcacgccgacuucgacaccugguucagccagcggggcggcuccuacaccaacgacaaggccugcccccugaucgcggccgucaucacccgcgaggugggguucgugguccccggccugcccggcaccauccuccggacgaccaacggggacuuccugcacuuccugccccgcguguucagcgccgugggcaacaucugcuacaccccguccaagcucaucgaguacaccgacuucgccacgagcgcgugcguccuggccgccgagugcaccaucuucaaggacgccuccgggaagcccgugcccuacugcuacgacaccaacgugcuggagggcagcgucgccuacgagucccuccggcccgacauccgcuacgugcugauggacgggagcaucauccaguucccgaacacguaccuggagggcuccgugcgggucgugaccaccuucgacagcgaguacugccgccacgggaccugcgagcgguccgaggcgggggugugcgucagcacguccggccgcugggugcucaacaacgacuacuaccggagccugcccgggguguucugcggcgucgacgccgugaaccugcucaccaacauguucacgccccugauccagcccaucggcgcccuggacaucuccgccagcaucgucgccgggggcaucguggcgaucguggugaccugccucgccuacuacuucaugcgcuuccggcgcgccuucggggaguacagccacgucguggccuucaacacccugcuguuccucauguccuucaccguccugugccugaccccgguguacagcuuccuccccggcguguacuccgucaucuaccuguaccugaccuucuaccucacgaacgacgugagcuuccuggcccacauccaguggauggugauguucacgccccugguccccuucuggaucaccaucgcguacaucaucugcaucuccaccaagcacuucuacugguucuucagcaacuaccucaagcggcgcgugguguucaacggggucuccuucagcaccuucgaggaggccgcccugugcaccuuccugcucaacaaggagauguaccugaagcugcgguccgacgugcuccugccgcugacccaguacaaccgcuaccucgcccuguacaacaaguacaaguacuucagcggcgccauggacaccacguccuaccgggaggcggccugcugccaccuggccaaggcccucaacgacuucagcaacuccggcagcgacgugcuguaccagccgccccagaucuccaucaccagcgcgguccugcagugaggacuaguuauaagacugacuagcccgaugggccucccaacgggcccuccuccccuccuugcaccgagauuaauaaaaaaaaaaaaaaaaaaaaaaaaaaaaaaaaaaaaaaaaaaaaaaaaaaaaaaaaaaaaaaaaugcaucccccccccccccccccccccccccccccccaaaggcucuuuucagagccaccagaauu

SEQ ID NO: 28470 - RNA, 1723 nt, Artificial Sequence
  SARS-CoV-2/Wuhan-Hu-1__NC_045512.2/MN908947.2/EPI_ISL_402128__non -structural protein 4 (NSP4) mRNA gc (1-501)(D218N_L439P)
aggagaaagcuuaccaugaagaucgugaacaacuggcugaagcagcucaucaaggucacccugguguuccuguucguggccgccaucuucuaccucaucacccccguccacgugaugagcaagcacacggacuucuccagcgagaucaucggcuacaaggcgaucgacgggggcgugacccgcgacaucgccuccaccgacacgugcuucgccaacaagcacgccgacuucgacaccugguucagccagcggggcggcuccuacaccaacgacaaggccugcccccugaucgcggccgucaucacccgcgaggugggguucgugguccccggccugcccggcaccauccuccggacgaccaacggggacuuccugcacuuccugccccgcguguucagcgccgugggcaacaucugcuacaccccguccaagcucaucgaguacaccgacuucgccacgagcgcgugcguccuggccgccgagugcaccaucuucaaggacgccuccgggaagcccgugcccuacugcuacgacaccaacgugcuggagggcagcgucgccuacgagucccuccggcccgacacccgcuacgugcugauggacgggagcaucauccaguucccgaacacguaccuggagggcuccgugcgggucgugaccaccuucaacagcgaguacugccgccacgggaccugcgagcgguccgaggcgggggugugcgucagcacguccggccgcugggugcucaacaacgacuacuaccggagccugcccgggguguucugcggcgucgacgccgugaaccugcucaccaacauguucacgccccugauccagcccaucggcgcccuggacaucuccgccagcaucgucgccgggggcaucguggcgaucguggugaccugccucgccuacuacuucaugcgcuuccggcgcgccuucggggaguacagccacgucguggccuucaacacccugcuguuccucauguccuucaccguccugugccugaccccgguguacagcuuccuccccggcguguacuccgucaucuaccuguaccugaccuucuaccucacgaacgacgugagcuuccuggcccacauccaguggauggugauguucacgccccugguccccuucuggaucaccaucgcguacaucaucugcaucuccaccaagcacuucuacugguucuucagcaacuaccucaagcggcgcgugguguucaacggggucuccuucagcaccuucgaggaggccgcccugugcaccuuccugcucaacaaggagauguaccugaagcugcgguccgacgugcuccugccgcccacccaguacaaccgcuaccucgcccuguacaacaaguacaaguacuucagcggcgccauggacaccacguccuaccgggaggcggccugcugccaccuggccaaggcccucaacgacuucagcaacuccggcagcgacgugcuguaccagccgccccagaccuccaucaccagcgcgguccugcagugaggacuaguuauaagacugacuagcccgaugggccucccaacgggcccuccuccccuccuugcaccgagauuaauaaaaaaaaaaaaaaaaaaaaaaaaaaaaaaaaaaaaaaaaaaaaaaaaaaaaaaaaaaaaaaaaugcaucccccccccccccccccccccccccccccccaaaggcucuuuucagagccaccagaauu

SEQ ID NO: 28471 - RNA, 1723 nt, Artificial Sequence
  SARS-CoV-2/Wuhan-Hu-1__NC_045512.2/MN908947.2/EPI_ISL_402128__non -structural protein 4 (NSP4) mRNA gc (1-501)(D218N_D460N)
aggagaaagcuuaccaugaagaucgugaacaacuggcugaagcagcucaucaaggucacccugguguuccuguucguggccgccaucuucuaccucaucacccccguccacgugaugagcaagcacacggacuucuccagcgagaucaucggcuacaaggcgaucgacgggggcgugacccgcgacaucgccuccaccgacacgugcuucgccaacaagcacgccgacuucgacaccugguucagccagcggggcggcuccuacaccaacgacaaggccugcccccugaucgcggccgucaucacccgcgaggugggguucgugguccccggccugcccggcaccauccuccggacgaccaacggggacuuccugcacuuccugccccgcguguucagcgccgugggcaacaucugcuacaccccguccaagcucaucgaguacaccgacuucgccacgagcgcgugcguccuggccgccgagugcaccaucuucaaggacgccuccgggaagcccgugcccuacugcuacgacaccaacgugcuggagggcagcgucgccuacgagucccuccggcccgacacccgcuacgugcugauggacgggagcaucauccaguucccgaacacguaccuggagggcuccgugcgggucgugaccaccuucaacagcgaguacugccgccacgggaccugcgagcgguccgaggcgggggugugcgucagcacguccggccgcugggugcucaacaacgacuacuaccggagccugcccgggguguucugcggcgucgacgccgugaaccugcucaccaacauguucacgccccugauccagcccaucggcgcccuggacaucuccgccagcaucgucgccgggggcaucguggcgaucguggugaccugccucgccuacuacuucaugcgcuuccggcgcgccuucggggaguacagccacgucguggccuucaacacccugcuguuccucauguccuucaccguccugugccugaccccgguguacagcuuccuccccggcguguacuccgucaucuaccuguaccugaccuucuaccucacgaacgacgugagcuuccuggcccacauccaguggauggugauguucacgccccugguccccuucuggaucaccaucgcguacaucaucugcaucuccaccaagcacuucuacugguucuucagcaacuaccucaagcggcgcgugguguucaacggggucuccuucagcaccuucgaggaggccgcccugugcaccuuccugcucaacaaggagauguaccugaagcugcgguccgacgugcuccugccgcugacccaguacaaccgcuaccucgcccuguacaacaaguacaaguacuucagcggcgccaugaacaccacguccuaccgggaggcggccugcugccaccuggccaaggcccucaacgacuucagcaacuccggcagcgacgugcuguaccagccgccccagaccuccaucaccagcgcgguccugcagugaggacuaguuauaagacugacuagcccgaugggccucccaacgggcccuccuccccuccuugcaccgagauuaauaaaaaaaaaaaaaaaaaaaaaaaaaaaaaaaaaaaaaaaaaaaaaaaaaaaaaaaaaaaaaaaaugcaucccccccccccccccccccccccccccccccaaaggcucuuuucagagccaccagaauu

SEQ ID NO: 28472 - RNA, 1723 nt, Artificial Sequence
  SARS-CoV-2/Wuhan-Hu-1__NC_045512.2/MN908947.2/EPI_ISL_402128__non -structural protein 4 (NSP4) mRNA gc (1-501)(S396T)
aggagaaagcuuaccaugaagaucgugaacaacuggcugaagcagcucaucaaggucacccugguguuccuguucguggccgccaucuucuaccucaucacccccguccacgugaugagcaagcacacggacuucuccagcgagaucaucggcuacaaggcgaucgacgggggcgugacccgcgacaucgccuccaccgacacgugcuucgccaacaagcacgccgacuucgacaccugguucagccagcggggcggcuccuacaccaacgacaaggccugcccccugaucgcggccgucaucacccgcgaggugggguucgugguccccggccugcccggcaccauccuccggacgaccaacggggacuuccugcacuuccugccccgcguguucagcgccgugggcaacaucugcuacaccccguccaagcucaucgaguacaccgacuucgccacgagcgcgugcguccuggccgccgagugcaccaucuucaaggacgccuccgggaagcccgugcccuacugcuacgacaccaacgugcuggagggcagcgucgccuacgagucccuccggcccgacacccgcuacgugcugauggacgggagcaucauccaguucccgaacacguaccuggagggcuccgugcgggucgugaccaccuucgacagcgaguacugccgccacgggaccugcgagcgguccgaggcgggggugugcgucagcacguccggccgcugggugcucaacaacgacuacuaccggagccugcccgggguguucugcggcgucgacgccgugaaccugcucaccaacauguucacgccccugauccagcccaucggcgcccuggacaucuccgccagcaucgucgccgggggcaucguggcgaucguggugaccugccucgccuacuacuucaugcgcuuccggcgcgccuucggggaguacagccacgucguggccuucaacacccugcuguuccucauguccuucaccguccugugccugaccccgguguacagcuuccuccccggcguguacuccgucaucuaccuguaccugaccuucuaccucacgaacgacgugagcuuccuggcccacauccaguggauggugauguucacgccccugguccccuucuggaucaccaucgcguacaucaucugcaucuccaccaagcacuucuacugguucuucaccaacuaccucaagcggcgcgugguguucaacggggucuccuucagcaccuucgaggaggccgcccugugcaccuuccugcucaacaaggagauguaccugaagcugcgguccgacgugcuccugccgcugacccaguacaaccgcuaccucgcccuguacaacaaguacaaguacuucagcggcgccauggacaccacguccuaccgggaggcggccugcugccaccuggccaaggcccucaacgacuucagcaacuccggcagcgacgugcuguaccagccgccccagaccuccaucaccagcgcgguccugcagugaggacuaguuauaagacugacuagcccgaugggccucccaacgggcccuccuccccuccuugcaccgagauuaauaaaaaaaaaaaaaaaaaaaaaaaaaaaaaaaaaaaaaaaaaaaaaaaaaaaaaaaaaaaaaaaaugcaucccccccccccccccccccccccccccccccaaaggcucuuuucagagccaccagaauu

SEQ ID NO: 28473 - RNA, 1723 nt, Artificial Sequence
  SARS-CoV-2/Wuhan-Hu-1__NC_045512.2/MN908947.2/EPI_ISL_402128__non -structural protein 4 (NSP4) mRNA gc (1-501)(L439P)
aggagaaagcuuaccaugaagaucgugaacaacuggcugaagcagcucaucaaggucacccugguguuccuguucguggccgccaucuucuaccucaucacccccguccacgugaugagcaagcacacggacuucuccagcgagaucaucggcuacaaggcgaucgacgggggcgugacccgcgacaucgccuccaccgacacgugcuucgccaacaagcacgccgacuucgacaccugguucagccagcggggcggcuccuacaccaacgacaaggccugcccccugaucgcggccgucaucacccgcgaggugggguucgugguccccggccugcccggcaccauccuccggacgaccaacggggacuuccugcacuuccugccccgcguguucagcgccgugggcaacaucugcuacaccccguccaagcucaucgaguacaccgacuucgccacgagcgcgugcguccuggccgccgagugcaccaucuucaaggacgccuccgggaagcccgugcccuacugcuacgacaccaacgugcuggagggcagcgucgccuacgagucccuccggcccgacacccgcuacgugcugauggacgggagcaucauccaguucccgaacacguaccuggagggcuccgugcgggucgugaccaccuucgacagcgaguacugccgccacgggaccugcgagcgguccgaggcgggggugugcgucagcacguccggccgcugggugcucaacaacgacuacuaccggagccugcccgggguguucugcggcgucgacgccgugaaccugcucaccaacauguucacgccccugauccagcccaucggcgcccuggacaucuccgccagcaucgucgccgggggcaucguggcgaucguggugaccugccucgccuacuacuucaugcgcuuccggcgcgccuucggggaguacagccacgucguggccuucaacacccugcuguuccucauguccuucaccguccugugccugaccccgguguacagcuuccuccccggcguguacuccgucaucuaccuguaccugaccuucuaccucacgaacgacgugagcuuccuggcccacauccaguggauggugauguucacgccccugguccccuucuggaucaccaucgcguacaucaucugcaucuccaccaagcacuucuacugguucuucagcaacuaccucaagcggcgcgugguguucaacggggucuccuucagcaccuucgaggaggccgcccugugcaccuuccugcucaacaaggagauguaccugaagcugcgguccgacgugcuccugccgcccacccaguacaaccgcuaccucgcccuguacaacaaguacaaguacuucagcggcgccauggacaccacguccuaccgggaggcggccugcugccaccuggccaaggcccucaacgacuucagcaacuccggcagcgacgugcuguaccagccgccccagaccuccaucaccagcgcgguccugcagugaggacuaguuauaagacugacuagcccgaugggccucccaacgggcccuccuccccuccuugcaccgagauuaauaaaaaaaaaaaaaaaaaaaaaaaaaaaaaaaaaaaaaaaaaaaaaaaaaaaaaaaaaaaaaaaaugcaucccccccccccccccccccccccccccccccaaaggcucuuuucagagccaccagaauu

SEQ ID NO: 28474 - RNA, 1723 nt, Artificial Sequence
  SARS-CoV-2/Wuhan-Hu-1__NC_045512.2/MN908947.2/EPI_ISL_402128__non -structural protein 4 (NSP4) mRNA gc (1-501)(A447V)
aggagaaagcuuaccaugaagaucgugaacaacuggcugaagcagcucaucaaggucacccugguguuccuguucguggccgccaucuucuaccucaucacccccguccacgugaugagcaagcacacggacuucuccagcgagaucaucggcuacaaggcgaucgacgggggcgugacccgcgacaucgccuccaccgacacgugcuucgccaacaagcacgccgacuucgacaccugguucagccagcggggcggcuccuacaccaacgacaaggccugcccccugaucgcggccgucaucacccgcgaggugggguucgugguccccggccugcccggcaccauccuccggacgaccaacggggacuuccugcacuuccugccccgcguguucagcgccgugggcaacaucugcuacaccccguccaagcucaucgaguacaccgacuucgccacgagcgcgugcguccuggccgccgagugcaccaucuucaaggacgccuccgggaagcccgugcccuacugcuacgacaccaacgugcuggagggcagcgucgccuacgagucccuccggcccgacacccgcuacgugcugauggacgggagcaucauccaguucccgaacacguaccuggagggcuccgugcgggucgugaccaccuucgacagcgaguacugccgccacgggaccugcgagcgguccgaggcgggggugugcgucagcacguccggccgcugggugcucaacaacgacuacuaccggagccugcccgggguguucugcggcgucgacgccgugaaccugcucaccaacauguucacgccccugauccagcccaucggcgcccuggacaucuccgccagcaucgucgccgggggcaucguggcgaucguggugaccugccucgccuacuacuucaugcgcuuccggcgcgccuucggggaguacagccacgucguggccuucaacacccugcuguuccucauguccuucaccguccugugccugaccccgguguacagcuuccuccccggcguguacuccgucaucuaccuguaccugaccuucuaccucacgaacgacgugagcuuccuggcccacauccaguggauggugauguucacgccccugguccccuucuggaucaccaucgcguacaucaucugcaucuccaccaagcacuucuacugguucuucagcaacuaccucaagcggcgcgugguguucaacggggucuccuucagcaccuucgaggaggccgcccugugcaccuuccugcucaacaaggagauguaccugaagcugcgguccgacgugcuccugccgcugacccaguacaaccgcuaccucgugcuguacaacaaguacaaguacuucagcggcgccauggacaccacguccuaccgggaggcggccugcugccaccuggccaaggcccucaacgacuucagcaacuccggcagcgacgugcuguaccagccgccccagaccuccaucaccagcgcgguccugcagugaggacuaguuauaagacugacuagcccgaugggccucccaacgggcccuccuccccuccuugcaccgagauuaauaaaaaaaaaaaaaaaaaaaaaaaaaaaaaaaaaaaaaaaaaaaaaaaaaaaaaaaaaaaaaaaaugcaucccccccccccccccccccccccccccccccaaaggcucuuuucagagccaccagaauu

SEQ ID NO: 28475 - RNA, 1723 nt, Artificial Sequence
  SARS-CoV-2/Wuhan-Hu-1__NC_045512.2/MN908947.2/EPI_ISL_402128__non -structural protein 4 (NSP4) mRNA gc (1-501)(L439P_T493I)
aggagaaagcuuaccaugaagaucgugaacaacuggcugaagcagcucaucaaggucacccugguguuccuguucguggccgccaucuucuaccucaucacccccguccacgugaugagcaagcacacggacuucuccagcgagaucaucggcuacaaggcgaucgacgggggcgugacccgcgacaucgccuccaccgacacgugcuucgccaacaagcacgccgacuucgacaccugguucagccagcggggcggcuccuacaccaacgacaaggccugcccccugaucgcggccgucaucacccgcgaggugggguucgugguccccggccugcccggcaccauccuccggacgaccaacggggacuuccugcacuuccugccccgcguguucagcgccgugggcaacaucugcuacaccccguccaagcucaucgaguacaccgacuucgccacgagcgcgugcguccuggccgccgagugcaccaucuucaaggacgccuccgggaagcccgugcccuacugcuacgacaccaacgugcuggagggcagcgucgccuacgagucccuccggcccgacacccgcuacgugcugauggacgggagcaucauccaguucccgaacacguaccuggagggcuccgugcgggucgugaccaccuucgacagcgaguacugccgccacgggaccugcgagcgguccgaggcgggggugugcgucagcacguccggccgcugggugcucaacaacgacuacuaccggagccugcccgggguguucugcggcgucgacgccgugaaccugcucaccaacauguucacgccccugauccagcccaucggcgcccuggacaucuccgccagcaucgucgccgggggcaucguggcgaucguggugaccugccucgccuacuacuucaugcgcuuccggcgcgccuucggggaguacagccacgucguggccuucaacacccugcuguuccucauguccuucaccguccugugccugaccccgguguacagcuuccuccccggcguguacuccgucaucuaccuguaccugaccuucuaccucacgaacgacgugagcuuccuggcccacauccaguggauggugauguucacgccccugguccccuucuggaucaccaucgcguacaucaucugcaucuccaccaagcacuucuacugguucuucagcaacuaccucaagcggcgcgugguguucaacggggucuccuucagcaccuucgaggaggccgcccugugcaccuuccugcucaacaaggagauguaccugaagcugcgguccgacgugcuccugccgcccacccaguacaaccgcuaccucgcccuguacaacaaguacaaguacuucagcggcgccauggacaccacguccuaccgggaggcggccugcugccaccuggccaaggcccucaacgacuucagcaacuccggcagcgacgugcuguaccagccgccccagaucuccaucaccagcgcgguccugcagugaggacuaguuauaagacugacuagcccgaugggccucccaacgggcccuccuccccuccuugcaccgagauuaauaaaaaaaaaaaaaaaaaaaaaaaaaaaaaaaaaaaaaaaaaaaaaaaaaaaaaaaaaaaaaaaaugcaucccccccccccccccccccccccccccccccaaaggcucuuuucagagccaccagaauu

SEQ ID NO: 28476 - RNA, 1723 nt, Artificial Sequence
  SARS-CoV-2/Wuhan-Hu-1__NC_045512.2/MN908947.2/EPI_ISL_402128__non -structural protein 4 (NSP4) mRNA gc (1-501)(T115I_S396T)
aggagaaagcuuaccaugaagaucgugaacaacuggcugaagcagcucaucaaggucacccugguguuccuguucguggccgccaucuucuaccucaucacccccguccacgugaugagcaagcacacggacuucuccagcgagaucaucggcuacaaggcgaucgacgggggcgugacccgcgacaucgccuccaccgacacgugcuucgccaacaagcacgccgacuucgacaccugguucagccagcggggcggcuccuacaccaacgacaaggccugcccccugaucgcggccgucaucacccgcgaggugggguucgugguccccggccugcccggcaccauccuccggacgaucaacggggacuuccugcacuuccugccccgcguguucagcgccgugggcaacaucugcuacaccccguccaagcucaucgaguacaccgacuucgccacgagcgcgugcguccuggccgccgagugcaccaucuucaaggacgccuccgggaagcccgugcccuacugcuacgacaccaacgugcuggagggcagcgucgccuacgagucccuccggcccgacacccgcuacgugcugauggacgggagcaucauccaguucccgaacacguaccuggagggcuccgugcgggucgugaccaccuucgacagcgaguacugccgccacgggaccugcgagcgguccgaggcgggggugugcgucagcacguccggccgcugggugcucaacaacgacuacuaccggagccugcccgggguguucugcggcgucgacgccgugaaccugcucaccaacauguucacgccccugauccagcccaucggcgcccuggacaucuccgccagcaucgucgccgggggcaucguggcgaucguggugaccugccucgccuacuacuucaugcgcuuccggcgcgccuucggggaguacagccacgucguggccuucaacacccugcuguuccucauguccuucaccguccugugccugaccccgguguacagcuuccuccccggcguguacuccgucaucuaccuguaccugaccuucuaccucacgaacgacgugagcuuccuggcccacauccaguggauggugauguucacgccccugguccccuucuggaucaccaucgcguacaucaucugcaucuccaccaagcacuucuacugguucuucaccaacuaccucaagcggcgcgugguguucaacggggucuccuucagcaccuucgaggaggccgcccugugcaccuuccugcucaacaaggagauguaccugaagcugcgguccgacgugcuccugccgcugacccaguacaaccgcuaccucgcccuguacaacaaguacaaguacuucagcggcgccauggacaccacguccuaccgggaggcggccugcugccaccuggccaaggcccucaacgacuucagcaacuccggcagcgacgugcuguaccagccgccccagaccuccaucaccagcgcgguccugcagugaggacuaguuauaagacugacuagcccgaugggccucccaacgggcccuccuccccuccuugcaccgagauuaauaaaaaaaaaaaaaaaaaaaaaaaaaaaaaaaaaaaaaaaaaaaaaaaaaaaaaaaaaaaaaaaaugcaucccccccccccccccccccccccccccccccaaaggcucuuuucagagccaccagaauu

SEQ ID NO: 28477 - RNA, 1723 nt, Artificial Sequence
  SARS-CoV-2/Wuhan-Hu-1__NC_045512.2/MN908947.2/EPI_ISL_402128__non -structural protein 4 (NSP4) mRNA gc (1-501)(K400E_L439P_A447V)
aggagaaagcuuaccaugaagaucgugaacaacuggcugaagcagcucaucaaggucacccugguguuccuguucguggccgccaucuucuaccucaucacccccguccacgugaugagcaagcacacggacuucuccagcgagaucaucggcuacaaggcgaucgacgggggcgugacccgcgacaucgccuccaccgacacgugcuucgccaacaagcacgccgacuucgacaccugguucagccagcggggcggcuccuacaccaacgacaaggccugcccccugaucgcggccgucaucacccgcgaggugggguucgugguccccggccugcccggcaccauccuccggacgaccaacggggacuuccugcacuuccugccccgcguguucagcgccgugggcaacaucugcuacaccccguccaagcucaucgaguacaccgacuucgccacgagcgcgugcguccuggccgccgagugcaccaucuucaaggacgccuccgggaagcccgugcccuacugcuacgacaccaacgugcuggagggcagcgucgccuacgagucccuccggcccgacacccgcuacgugcugauggacgggagcaucauccaguucccgaacacguaccuggagggcuccgugcgggucgugaccaccuucgacagcgaguacugccgccacgggaccugcgagcgguccgaggcgggggugugcgucagcacguccggccgcugggugcucaacaacgacuacuaccggagccugcccgggguguucugcggcgucgacgccgugaaccugcucaccaacauguucacgccccugauccagcccaucggcgcccuggacaucuccgccagcaucgucgccgggggcaucguggcgaucguggugaccugccucgccuacuacuucaugcgcuuccggcgcgccuucggggaguacagccacgucguggccuucaacacccugcuguuccucauguccuucaccguccugugccugaccccgguguacagcuuccuccccggcguguacuccgucaucuaccuguaccugaccuucuaccucacgaacgacgugagcuuccuggcccacauccaguggauggugauguucacgccccugguccccuucuggaucaccaucgcguacaucaucugcaucuccaccaagcacuucuacugguucuucagcaacuaccucgagcggcgcgugguguucaacggggucuccuucagcaccuucgaggaggccgcccugugcaccuuccugcucaacaaggagauguaccugaagcugcgguccgacgugcuccugccgcccacccaguacaaccgcuaccucgugcuguacaacaaguacaaguacuucagcggcgccauggacaccacguccuaccgggaggcggccugcugccaccuggccaaggcccucaacgacuucagcaacuccggcagcgacgugcuguaccagccgccccagaccuccaucaccagcgcgguccugcagugaggacuaguuauaagacugacuagcccgaugggccucccaacgggcccuccuccccuccuugcaccgagauuaauaaaaaaaaaaaaaaaaaaaaaaaaaaaaaaaaaaaaaaaaaaaaaaaaaaaaaaaaaaaaaaaaugcaucccccccccccccccccccccccccccccccaaaggcucuuuucagagccaccagaauu

SEQ ID NO: 28478 - RNA, 1723 nt, Artificial Sequence
  SARS-CoV-2/Wuhan-Hu-1__NC_045512.2/MN908947.2/EPI_ISL_402128__non -structural protein 4 (NSP4) mRNA gc (1-501)(L448F)
aggagaaagcuuaccaugaagaucgugaacaacuggcugaagcagcucaucaaggucacccugguguuccuguucguggccgccaucuucuaccucaucacccccguccacgugaugagcaagcacacggacuucuccagcgagaucaucggcuacaaggcgaucgacgggggcgugacccgcgacaucgccuccaccgacacgugcuucgccaacaagcacgccgacuucgacaccugguucagccagcggggcggcuccuacaccaacgacaaggccugcccccugaucgcggccgucaucacccgcgaggugggguucgugguccccggccugcccggcaccauccuccggacgaccaacggggacuuccugcacuuccugccccgcguguucagcgccgugggcaacaucugcuacaccccguccaagcucaucgaguacaccgacuucgccacgagcgcgugcguccuggccgccgagugcaccaucuucaaggacgccuccgggaagcccgugcccuacugcuacgacaccaacgugcuggagggcagcgucgccuacgagucccuccggcccgacacccgcuacgugcugauggacgggagcaucauccaguucccgaacacguaccuggagggcuccgugcgggucgugaccaccuucgacagcgaguacugccgccacgggaccugcgagcgguccgaggcgggggugugcgucagcacguccggccgcugggugcucaacaacgacuacuaccggagccugcccgggguguucugcggcgucgacgccgugaaccugcucaccaacauguucacgccccugauccagcccaucggcgcccuggacaucuccgccagcaucgucgccgggggcaucguggcgaucguggugaccugccucgccuacuacuucaugcgcuuccggcgcgccuucggggaguacagccacgucguggccuucaacacccugcuguuccucauguccuucaccguccugugccugaccccgguguacagcuuccuccccggcguguacuccgucaucuaccuguaccugaccuucuaccucacgaacgacgugagcuuccuggcccacauccaguggauggugauguucacgccccugguccccuucuggaucaccaucgcguacaucaucugcaucuccaccaagcacuucuacugguucuucagcaacuaccucaagcggcgcgugguguucaacggggucuccuucagcaccuucgaggaggccgcccugugcaccuuccugcucaacaaggagauguaccugaagcugcgguccgacgugcuccugccgcugacccaguacaaccgcuaccucgccuucuacaacaaguacaaguacuucagcggcgccauggacaccacguccuaccgggaggcggccugcugccaccuggccaaggcccucaacgacuucagcaacuccggcagcgacgugcuguaccagccgccccagaccuccaucaccagcgcgguccugcagugaggacuaguuauaagacugacuagcccgaugggccucccaacgggcccuccuccccuccuugcaccgagauuaauaaaaaaaaaaaaaaaaaaaaaaaaaaaaaaaaaaaaaaaaaaaaaaaaaaaaaaaaaaaaaaaaugcaucccccccccccccccccccccccccccccccaaaggcucuuuucagagccaccagaauu

SEQ ID NO: 28479 - RNA, 1093 nt, Artificial Sequence
  SARS-CoV-2/Wuhan-Hu-1__NC_045512.2/MN908947.2/EPI_ISL_402128__non -structural protein 6 (NSP6) mRNA gc (1-291)(T78A_V150A_I163V_T182I)
aggagaaagcuuaccaugagcgccgugaagcgcaccaucaagggcacccaccacuggcugcuccugacgauccugaccucccuccugguccuggugcagagcacccaguggucccucuucuucuuccuguacgagaacgccuuccugcccuucgcgauggggaucaucgccaugagcgccuucgccaugauguucgugaagcacaagcacgccuuccucugccuguuccugcucccgucccuggcggccgucgccuacuucaacaugguguacaugcccgccagcugggugaugcggaucaugacguggcuggacauggucgacaccucccucagcggcuucaagcugaaggacugcgugauguacgccuccgcggugguccugcucauccugaugaccgcccgcaccguguacgacgacggggcccggcgcguguggacgcugaugaacguccucacccuggccuacaagguguacuacggcaacgcccuggaccaggccgugagcaugugggcgcucaucaucuccgucaccagcaacuacuccgggguggugaccaucgucauguuccuggcccggggcaucguguucaugugcguggaguacugccccaucuucuucaucaccggcaacacccugcagugcaucaugcucgucuacugcuuccugggguacuucugcacgugcuacuucggccuguucugccuccugaaccgcuacuuccggcugacccucgggguguacgacuaccuggugagcacccaggaguuccgcuacaugaacucccagggccugcugcccccgaagaacagcaucgacgccuucaagcucaacaucaagcugcucggggucggcggcaagcccugcaucaagguggccaccguccagugaggacuaguuauaagacugacuagcccgaugggccucccaacgggcccuccuccccuccuugcaccgagauuaauaaaaaaaaaaaaaaaaaaaaaaaaaaaaaaaaaaaaaaaaaaaaaaaaaaaaaaaaaaaaaaaaugcaucccccccccccccccccccccccccccccccaaaggcucuuuucagagccaccagaauu

SEQ ID NO: 28480 - RNA, 1084 nt, Artificial Sequence
  SARS-CoV-2/Wuhan-Hu-1__NC_045512.2/MN908947.2/EPI_ISL_402128__non -structural protein 6 (NSP6) mRNA gc (1-291)(S107del_G108del_F109del)
aggagaaagcuuaccaugagcgccgugaagcgcaccaucaagggcacccaccacuggcugcuccugacgauccugaccucccuccugguccuggugcagagcacccaguggucccucuucuucuuccuguacgagaacgccuuccugcccuucgcgauggggaucaucgccaugagcgccuucgccaugauguucgugaagcacaagcacgccuuccucugccuguuccugcucccgucccuggcgaccgucgccuacuucaacaugguguacaugcccgccagcugggugaugcggaucaugacguggcuggacauggucgacaccucccucaagcugaaggacugcgugauguacgccuccgcggugguccugcucauccugaugaccgcccgcaccguguacgacgacggggcccggcgcguguggacgcugaugaacguccucacccugguguacaagguguacuacggcaacgcccuggaccaggccaucagcaugugggcgcucaucaucuccgucaccagcaacuacuccgggguggugaccacggucauguuccuggcccggggcaucguguucaugugcguggaguacugccccaucuucuucaucaccggcaacacccugcagugcaucaugcucgucuacugcuuccugggguacuucugcacgugcuacuucggccuguucugccuccugaaccgcuacuuccggcugacccucgggguguacgacuaccuggugagcacccaggaguuccgcuacaugaacucccagggccugcugcccccgaagaacagcaucgacgccuucaagcucaacaucaagcugcucggggucggcggcaagcccugcaucaagguggccaccguccagugaggacuaguuauaagacugacuagcccgaugggccucccaacgggcccuccuccccuccuugcaccgagauuaauaaaaaaaaaaaaaaaaaaaaaaaaaaaaaaaaaaaaaaaaaaaaaaaaaaaaaaaaaaaaaaaaugcaucccccccccccccccccccccccccccccccaaaggcucuuuucagagccaccagaauu

SEQ ID NO: 28481 - RNA, 1084 nt, Artificial Sequence
  SARS-CoV-2/Wuhan-Hu-1__NC_045512.2/MN908947.2/EPI_ISL_402128__non -structural protein 6 (NSP6) mRNA gc (1-291)(S107del_G108del_F109del_M165T)
aggagaaagcuuaccaugagcgccgugaagcgcaccaucaagggcacccaccacuggcugcuccugacgauccugaccucccuccugguccuggugcagagcacccaguggucccucuucuucuuccuguacgagaacgccuuccugcccuucgcgauggggaucaucgccaugagcgccuucgccaugauguucgugaagcacaagcacgccuuccucugccuguuccugcucccgucccuggcgaccgucgccuacuucaacaugguguacaugcccgccagcugggugaugcggaucaugacguggcuggacauggucgacaccucccucaagcugaaggacugcgugauguacgccuccgcggugguccugcucauccugaugaccgcccgcaccguguacgacgacggggcccggcgcguguggacgcugaugaacguccucacccugguguacaagguguacuacggcaacgcccuggaccaggccaucagcaccugggcgcucaucaucuccgucaccagcaacuacuccgggguggugaccacggucauguuccuggcccggggcaucguguucaugugcguggaguacugccccaucuucuucaucaccggcaacacccugcagugcaucaugcucgucuacugcuuccugggguacuucugcacgugcuacuucggccuguucugccuccugaaccgcuacuuccggcugacccucgggguguacgacuaccuggugagcacccaggaguuccgcuacaugaacucccagggccugcugcccccgaagaacagcaucgacgccuucaagcucaacaucaagcugcucggggucggcggcaagcccugcaucaagguggccaccguccagugaggacuaguuauaagacugacuagcccgaugggccucccaacgggcccuccuccccuccuugcaccgagauuaauaaaaaaaaaaaaaaaaaaaaaaaaaaaaaaaaaaaaaaaaaaaaaaaaaaaaaaaaaaaaaaaaugcaucccccccccccccccccccccccccccccccaaaggcucuuuucagagccaccagaauu

SEQ ID NO: 28482 - RNA, 1093 nt, Artificial Sequence
  SARS-CoV-2/Wuhan-Hu-1__NC_045512.2/MN908947.2/EPI_ISL_402128__non -structural protein 6 (NSP6) mRNA gc (1-291)(V27G_L38F_F221L_C222F)
aggagaaagcuuaccaugagcgccgugaagcgcaccaucaagggcacccaccacuggcugcuccugacgauccugaccucccuccugguccugggccagagcacccaguggucccucuucuucuucuucuacgagaacgccuuccugcccuucgcgauggggaucaucgccaugagcgccuucgccaugauguucgugaagcacaagcacgccuuccucugccuguuccugcucccgucccuggcgaccgucgccuacuucaacaugguguacaugcccgccagcugggugaugcggaucaugacguggcuggacauggucgacaccucccucagcggcuucaagcugaaggacugcgugauguacgccuccgcggugguccugcucauccugaugaccgcccgcaccguguacgacgacggggcccggcgcguguggacgcugaugaacguccucacccugguguacaagguguacuacggcaacgcccuggaccaggccaucagcaugugggcgcucaucaucuccgucaccagcaacuacuccgggguggugaccacggucauguuccuggcccggggcaucguguucaugugcguggaguacugccccaucuucuucaucaccggcaacacccugcagugcaucaugcucgucuacugcuuccugggguaccuguucacgugcuacuucggccuguucugccuccugaaccgcuacuuccggcugacccucgggguguacgacuaccuggugagcacccaggaguuccgcuacaugaacucccagggccugcugcccccgaagaacagcaucgacgccuucaagcucaacaucaagcugcucggggucggcggcaagcccugcaucaagguggccaccguccagugaggacuaguuauaagacugacuagcccgaugggccucccaacgggcccuccuccccuccuugcaccgagauuaauaaaaaaaaaaaaaaaaaaaaaaaaaaaaaaaaaaaaaaaaaaaaaaaaaaaaaaaaaaaaaaaaugcaucccccccccccccccccccccccccccccccaaaggcucuuuucagagccaccagaauu

SEQ ID NO: 28483 - RNA, 1093 nt, Artificial Sequence
  SARS-CoV-2/Wuhan-Hu-1__NC_045512.2/MN908947.2/EPI_ISL_402128__non -structural protein 6 (NSP6) mRNA gc (1-291)(L38F_L126F)
aggagaaagcuuaccaugagcgccgugaagcgcaccaucaagggcacccaccacuggcugcuccugacgauccugaccucccuccugguccuggugcagagcacccaguggucccucuucuucuucuucuacgagaacgccuuccugcccuucgcgauggggaucaucgccaugagcgccuucgccaugauguucgugaagcacaagcacgccuuccucugccuguuccugcucccgucccuggcgaccgucgccuacuucaacaugguguacaugcccgccagcugggugaugcggaucaugacguggcuggacauggucgacaccucccucagcggcuucaagcugaaggacugcgugauguacgccuccgcggugguccugcucaucuucaugaccgcccgcaccguguacgacgacggggcccggcgcguguggacgcugaugaacguccucacccugguguacaagguguacuacggcaacgcccuggaccaggccaucagcaugugggcgcucaucaucuccgucaccagcaacuacuccgggguggugaccacggucauguuccuggcccggggcaucguguucaugugcguggaguacugccccaucuucuucaucaccggcaacacccugcagugcaucaugcucgucuacugcuuccugggguacuucugcacgugcuacuucggccuguucugccuccugaaccgcuacuuccggcugacccucgggguguacgacuaccuggugagcacccaggaguuccgcuacaugaacucccagggccugcugcccccgaagaacagcaucgacgccuucaagcucaacaucaagcugcucggggucggcggcaagcccugcaucaagguggccaccguccagugaggacuaguuauaagacugacuagcccgaugggccucccaacgggcccuccuccccuccuugcaccgagauuaauaaaaaaaaaaaaaaaaaaaaaaaaaaaaaaaaaaaaaaaaaaaaaaaaaaaaaaaaaaaaaaaaugcaucccccccccccccccccccccccccccccccaaaggcucuuuucagagccaccagaauu

SEQ ID NO: 28484 - RNA, 1084 nt, Artificial Sequence
  SARS-CoV-2/Wuhan-Hu-1__NC_045512.2/MN908947.2/EPI_ISL_402128__non -structural protein 6 (NSP6) mRNA gc (1-291)(S107del_G108del_F109del_L126F)
aggagaaagcuuaccaugagcgccgugaagcgcaccaucaagggcacccaccacuggcugcuccugacgauccugaccucccuccugguccuggugcagagcacccaguggucccucuucuucuuccuguacgagaacgccuuccugcccuucgcgauggggaucaucgccaugagcgccuucgccaugauguucgugaagcacaagcacgccuuccucugccuguuccugcucccgucccuggcgaccgucgccuacuucaacaugguguacaugcccgccagcugggugaugcggaucaugacguggcuggacauggucgacaccucccucaagcugaaggacugcgugauguacgccuccgcggugguccugcucaucuucaugaccgcccgcaccguguacgacgacggggcccggcgcguguggacgcugaugaacguccucacccugguguacaagguguacuacggcaacgcccuggaccaggccaucagcaugugggcgcucaucaucuccgucaccagcaacuacuccgggguggugaccacggucauguuccuggcccggggcaucguguucaugugcguggaguacugccccaucuucuucaucaccggcaacacccugcagugcaucaugcucgucuacugcuuccugggguacuucugcacgugcuacuucggccuguucugccuccugaaccgcuacuuccggcugacccucgggguguacgacuaccuggugagcacccaggaguuccgcuacaugaacucccagggccugcugcccccgaagaacagcaucgacgccuucaagcucaacaucaagcugcucggggucggcggcaagcccugcaucaagguggccaccguccagugaggacuaguuauaagacugacuagcccgaugggccucccaacgggcccuccuccccuccuugcaccgagauuaauaaaaaaaaaaaaaaaaaaaaaaaaaaaaaaaaaaaaaaaaaaaaaaaaaaaaaaaaaaaaaaaaugcaucccccccccccccccccccccccccccccccaaaggcucuuuucagagccaccagaauu

SEQ ID NO: 28485 - RNA, 1084 nt, Artificial Sequence
  SARS-CoV-2/Wuhan-Hu-1__NC_045512.2/MN908947.2/EPI_ISL_402128__non -structural protein 6 (NSP6) mRNA gc (1-291)(S107del_G108del_F109del_V279I)
aggagaaagcuuaccaugagcgccgugaagcgcaccaucaagggcacccaccacuggcugcuccugacgauccugaccucccuccugguccuggugcagagcacccaguggucccucuucuucuuccuguacgagaacgccuuccugcccuucgcgauggggaucaucgccaugagcgccuucgccaugauguucgugaagcacaagcacgccuuccucugccuguuccugcucccgucccuggcgaccgucgccuacuucaacaugguguacaugcccgccagcugggugaugcggaucaugacguggcuggacauggucgacaccucccucaagcugaaggacugcgugauguacgccuccgcggugguccugcucauccugaugaccgcccgcaccguguacgacgacggggcccggcgcguguggacgcugaugaacguccucacccugguguacaagguguacuacggcaacgcccuggaccaggccaucagcaugugggcgcucaucaucuccgucaccagcaacuacuccgggguggugaccacggucauguuccuggcccggggcaucguguucaugugcguggaguacugccccaucuucuucaucaccggcaacacccugcagugcaucaugcucgucuacugcuuccugggguacuucugcacgugcuacuucggccuguucugccuccugaaccgcuacuuccggcugacccucgggguguacgacuaccuggugagcacccaggaguuccgcuacaugaacucccagggccugcugcccccgaagaacagcaucgacgccuucaagcucaacaucaagcugcucgggaucggcggcaagcccugcaucaagguggccaccguccagugaggacuaguuauaagacugacuagcccgaugggccucccaacgggcccuccuccccuccuugcaccgagauuaauaaaaaaaaaaaaaaaaaaaaaaaaaaaaaaaaaaaaaaaaaaaaaaaaaaaaaaaaaaaaaaaaugcaucccccccccccccccccccccccccccccccaaaggcucuuuucagagccaccagaauu

SEQ ID NO: 28486 - RNA, 1045 nt, Artificial Sequence
  SARS-CoV-2/Wuhan-Hu-1__NC_045512.2/MN908947.2/EPI_ISL_402128__ORF 3a protein (ORF3a) mRNA gc (1-275)(Q57H_S171L)
aggagaaagcuuaccauggaccuguucaugcgcaucuucaccaucggcaccgugacgcucaagcagggggagaucaaggacgccacccccagcgacuucguccgggccaccgcgaccaucccgauccaggccucccugcccuucggcuggcugaucguggggguggcccuccuggccgucuuccacagcgccuccaagaucaucacgcugaagaagcgcuggcagcucgcgcugagcaagggcgugcacuucgugugcaaccugcuccugcuguucgucaccguguacucccaccuccugcugguggccgccgggcucgaggcccccuuccuguaccuguacgcgcucgucuacuuccugcagagcaucaacuucgugcggaucaucaugcgccuguggcucugcuggaagugccgguccaagaacccccugcuguacgacgccaacuacuuccucugcuggcacaccaacugcuacgacuacugcaucccguacaacagcgugaccuccagcaucgucaucacgcugggcgacggcaccaccagccccaucuccgagcacgacuaccagaucgggggcuacaccgagaagugggagagcggggugaaggacugcgugguccugcacuccuacuucacgagcgacuacuaccagcuguacuccacccagcucagcaccgacaccggcguggagcacgugacguucuucaucuacaacaagaucgucgacgagcccgaggagcacgugcagauccacaccaucgacggguccagcggcguggucaaccccgugauggagccgaucuacgacgagcccaccaccacgaccagcgugccccugugaggacuaguuauaagacugacuagcccgaugggccucccaacgggcccuccuccccuccuugcaccgagauuaauaaaaaaaaaaaaaaaaaaaaaaaaaaaaaaaaaaaaaaaaaaaaaaaaaaaaaaaaaaaaaaaaugcaucccccccccccccccccccccccccccccccaaaggcucuuuucagagccaccagaauu

SEQ ID NO: 28487 - RNA, 1045 nt, Artificial Sequence
  SARS-CoV-2/Wuhan-Hu-1__NC_045512.2/MN908947.2/EPI_ISL_402128__ORF 3a protein (ORF3a) mRNA gc (1-275)(D155Y_S253P)
aggagaaagcuuaccauggaccuguucaugcgcaucuucaccaucggcaccgugacgcucaagcagggggagaucaaggacgccacccccagcgacuucguccgggccaccgcgaccaucccgauccaggccucccugcccuucggcuggcugaucguggggguggcccuccuggccgucuuccagagcgccuccaagaucaucacgcugaagaagcgcuggcagcucgcgcugagcaagggcgugcacuucgugugcaaccugcuccugcuguucgucaccguguacucccaccuccugcugguggccgccgggcucgaggcccccuuccuguaccuguacgcgcucgucuacuuccugcagagcaucaacuucgugcggaucaucaugcgccuguggcucugcuggaagugccgguccaagaacccccugcuguacgacgccaacuacuuccucugcuggcacaccaacugcuacuacuacugcaucccguacaacagcgugaccuccagcaucgucaucacguccggcgacggcaccaccagccccaucuccgagcacgacuaccagaucgggggcuacaccgagaagugggagagcggggugaaggacugcgugguccugcacuccuacuucacgagcgacuacuaccagcuguacuccacccagcucagcaccgacaccggcguggagcacgugacguucuucaucuacaacaagaucgucgacgagcccgaggagcacgugcagauccacaccaucgacgggucccccggcguggucaaccccgugauggagccgaucuacgacgagcccaccaccacgaccagcgugccccugugaggacuaguuauaagacugacuagcccgaugggccucccaacgggcccuccuccccuccuugcaccgagauuaauaaaaaaaaaaaaaaaaaaaaaaaaaaaaaaaaaaaaaaaaaaaaaaaaaaaaaaaaaaaaaaaaugcaucccccccccccccccccccccccccccccccaaaggcucuuuucagagccaccagaauu

SEQ ID NO: 28488 - RNA, 1045 nt, Artificial Sequence
  SARS-CoV-2/Wuhan-Hu-1__NC_045512.2/MN908947.2/EPI_ISL_402128__ORF 3a protein (ORF3a) mRNA gc (1-275)(S253P)
aggagaaagcuuaccauggaccuguucaugcgcaucuucaccaucggcaccgugacgcucaagcagggggagaucaaggacgccacccccagcgacuucguccgggccaccgcgaccaucccgauccaggccucccugcccuucggcuggcugaucguggggguggcccuccuggccgucuuccagagcgccuccaagaucaucacgcugaagaagcgcuggcagcucgcgcugagcaagggcgugcacuucgugugcaaccugcuccugcuguucgucaccguguacucccaccuccugcugguggccgccgggcucgaggcccccuuccuguaccuguacgcgcucgucuacuuccugcagagcaucaacuucgugcggaucaucaugcgccuguggcucugcuggaagugccgguccaagaacccccugcuguacgacgccaacuacuuccucugcuggcacaccaacugcuacgacuacugcaucccguacaacagcgugaccuccagcaucgucaucacguccggcgacggcaccaccagccccaucuccgagcacgacuaccagaucgggggcuacaccgagaagugggagagcggggugaaggacugcgugguccugcacuccuacuucacgagcgacuacuaccagcuguacuccacccagcucagcaccgacaccggcguggagcacgugacguucuucaucuacaacaagaucgucgacgagcccgaggagcacgugcagauccacaccaucgacgggucccccggcguggucaaccccgugauggagccgaucuacgacgagcccaccaccacgaccagcgugccccugugaggacuaguuauaagacugacuagcccgaugggccucccaacgggcccuccuccccuccuugcaccgagauuaauaaaaaaaaaaaaaaaaaaaaaaaaaaaaaaaaaaaaaaaaaaaaaaaaaaaaaaaaaaaaaaaaugcaucccccccccccccccccccccccccccccccaaaggcucuuuucagagccaccagaauu

SEQ ID NO: 28489 - RNA, 1045 nt, Artificial Sequence
  SARS-CoV-2/Wuhan-Hu-1__NC_045512.2/MN908947.2/EPI_ISL_402128__ORF 3a protein (ORF3a) mRNA gc (1-275)(L15F_W131C_T151I)
aggagaaagcuuaccauggaccuguucaugcgcaucuucaccaucggcaccgugacguucaagcagggggagaucaaggacgccacccccagcgacuucguccgggccaccgcgaccaucccgauccaggccucccugcccuucggcuggcugaucguggggguggcccuccuggccgucuuccagagcgccuccaagaucaucacgcugaagaagcgcuggcagcucgcgcugagcaagggcgugcacuucgugugcaaccugcuccugcuguucgucaccguguacucccaccuccugcugguggccgccgggcucgaggcccccuuccuguaccuguacgcgcucgucuacuuccugcagagcaucaacuucgugcggaucaucaugcgccuguggcucugcugcaagugccgguccaagaacccccugcuguacgacgccaacuacuuccucugcuggcacaucaacugcuacgacuacugcaucccguacaacagcgugaccuccagcaucgucaucacguccggcgacggcaccaccagccccaucuccgagcacgacuaccagaucgggggcuacaccgagaagugggagagcggggugaaggacugcgugguccugcacuccuacuucacgagcgacuacuaccagcuguacuccacccagcucagcaccgacaccggcguggagcacgugacguucuucaucuacaacaagaucgucgacgagcccgaggagcacgugcagauccacaccaucgacggguccagcggcguggucaaccccgugauggagccgaucuacgacgagcccaccaccacgaccagcgugccccugugaggacuaguuauaagacugacuagcccgaugggccucccaacgggcccuccuccccuccuugcaccgagauuaauaaaaaaaaaaaaaaaaaaaaaaaaaaaaaaaaaaaaaaaaaaaaaaaaaaaaaaaaaaaaaaaaugcaucccccccccccccccccccccccccccccccaaaggcucuuuucagagccaccagaauu

SEQ ID NO: 28490 - RNA, 1045 nt, Artificial Sequence
  SARS-CoV-2/Wuhan-Hu-1__NC_045512.2/MN908947.2/EPI_ISL_402128__ORF 3a protein (ORF3a) mRNA gc (1-275)(P42L_Q57H)
aggagaaagcuuaccauggaccuguucaugcgcaucuucaccaucggcaccgugacgcucaagcagggggagaucaaggacgccacccccagcgacuucguccgggccaccgcgaccaucccgauccaggccucccugcuguucggcuggcugaucguggggguggcccuccuggccgucuuccacagcgccuccaagaucaucacgcugaagaagcgcuggcagcucgcgcugagcaagggcgugcacuucgugugcaaccugcuccugcuguucgucaccguguacucccaccuccugcugguggccgccgggcucgaggcccccuuccuguaccuguacgcgcucgucuacuuccugcagagcaucaacuucgugcggaucaucaugcgccuguggcucugcuggaagugccgguccaagaacccccugcuguacgacgccaacuacuuccucugcuggcacaccaacugcuacgacuacugcaucccguacaacagcgugaccuccagcaucgucaucacguccggcgacggcaccaccagccccaucuccgagcacgacuaccagaucgggggcuacaccgagaagugggagagcggggugaaggacugcgugguccugcacuccuacuucacgagcgacuacuaccagcuguacuccacccagcucagcaccgacaccggcguggagcacgugacguucuucaucuacaacaagaucgucgacgagcccgaggagcacgugcagauccacaccaucgacggguccagcggcguggucaaccccgugauggagccgaucuacgacgagcccaccaccacgaccagcgugccccugugaggacuaguuauaagacugacuagcccgaugggccucccaacgggcccuccuccccuccuugcaccgagauuaauaaaaaaaaaaaaaaaaaaaaaaaaaaaaaaaaaaaaaaaaaaaaaaaaaaaaaaaaaaaaaaaaugcaucccccccccccccccccccccccccccccccaaaggcucuuuucagagccaccagaauu

SEQ ID NO: 28491 - RNA, 1042 nt, Artificial Sequence
  SARS-CoV-2/Wuhan-Hu-1__NC_045512.2/MN908947.2/EPI_ISL_402128__ORF 3a protein (ORF3a) mRNA gc (1-275)(Q57H_N257del)
aggagaaagcuuaccauggaccuguucaugcgcaucuucaccaucggcaccgugacgcucaagcagggggagaucaaggacgccacccccagcgacuucguccgggccaccgcgaccaucccgauccaggccucccugcccuucggcuggcugaucguggggguggcccuccuggccgucuuccacagcgccuccaagaucaucacgcugaagaagcgcuggcagcucgcgcugagcaagggcgugcacuucgugugcaaccugcuccugcuguucgucaccguguacucccaccuccugcugguggccgccgggcucgaggcccccuuccuguaccuguacgcgcucgucuacuuccugcagagcaucaacuucgugcggaucaucaugcgccuguggcucugcuggaagugccgguccaagaacccccugcuguacgacgccaacuacuuccucugcuggcacaccaacugcuacgacuacugcaucccguacaacagcgugaccuccagcaucgucaucacguccggcgacggcaccaccagccccaucuccgagcacgacuaccagaucgggggcuacaccgagaagugggagagcggggugaaggacugcgugguccugcacuccuacuucacgagcgacuacuaccagcuguacuccacccagcucagcaccgacaccggcguggagcacgugacguucuucaucuacaacaagaucgucgacgagcccgaggagcacgugcagauccacaccaucgacggguccagcggcgugguccccgugauggagccgaucuacgacgagcccaccaccacgaccagcgugccccugugaggacuaguuauaagacugacuagcccgaugggccucccaacgggcccuccuccccuccuugcaccgagauuaauaaaaaaaaaaaaaaaaaaaaaaaaaaaaaaaaaaaaaaaaaaaaaaaaaaaaaaaaaaaaaaaaugcaucccccccccccccccccccccccccccccccaaaggcucuuuucagagccaccagaauu

SEQ ID NO: 28492 - RNA, 1042 nt, Artificial Sequence
  SARS-CoV-2/Wuhan-Hu-1__NC_045512.2/MN908947.2/EPI_ISL_402128__ORF 3a protein (ORF3a) mRNA gc (1-275)(N257del)
aggagaaagcuuaccauggaccuguucaugcgcaucuucaccaucggcaccgugacgcucaagcagggggagaucaaggacgccacccccagcgacuucguccgggccaccgcgaccaucccgauccaggccucccugcccuucggcuggcugaucguggggguggcccuccuggccgucuuccagagcgccuccaagaucaucacgcugaagaagcgcuggcagcucgcgcugagcaagggcgugcacuucgugugcaaccugcuccugcuguucgucaccguguacucccaccuccugcugguggccgccgggcucgaggcccccuuccuguaccuguacgcgcucgucuacuuccugcagagcaucaacuucgugcggaucaucaugcgccuguggcucugcuggaagugccgguccaagaacccccugcuguacgacgccaacuacuuccucugcuggcacaccaacugcuacgacuacugcaucccguacaacagcgugaccuccagcaucgucaucacguccggcgacggcaccaccagccccaucuccgagcacgacuaccagaucgggggcuacaccgagaagugggagagcggggugaaggacugcgugguccugcacuccuacuucacgagcgacuacuaccagcuguacuccacccagcucagcaccgacaccggcguggagcacgugacguucuucaucuacaacaagaucgucgacgagcccgaggagcacgugcagauccacaccaucgacggguccagcggcgugguccccgugauggagccgaucuacgacgagcccaccaccacgaccagcgugccccugugaggacuaguuauaagacugacuagcccgaugggccucccaacgggcccuccuccccuccuugcaccgagauuaauaaaaaaaaaaaaaaaaaaaaaaaaaaaaaaaaaaaaaaaaaaaaaaaaaaaaaaaaaaaaaaaaugcaucccccccccccccccccccccccccccccccaaaggcucuuuucagagccaccagaauu

SEQ ID NO: 28493 - RNA, 1045 nt, Artificial Sequence
  SARS-CoV-2/Wuhan-Hu-1__NC_045512.2/MN908947.2/EPI_ISL_402128__ORF 3a protein (ORF3a) mRNA gc (1-275)(P42L_Q57H_P104L)
aggagaaagcuuaccauggaccuguucaugcgcaucuucaccaucggcaccgugacgcucaagcagggggagaucaaggacgccacccccagcgacuucguccgggccaccgcgaccaucccgauccaggccucccugcuguucggcuggcugaucguggggguggcccuccuggccgucuuccacagcgccuccaagaucaucacgcugaagaagcgcuggcagcucgcgcugagcaagggcgugcacuucgugugcaaccugcuccugcuguucgucaccguguacucccaccuccugcugguggccgccgggcucgaggcccuguuccuguaccuguacgcgcucgucuacuuccugcagagcaucaacuucgugcggaucaucaugcgccuguggcucugcuggaagugccgguccaagaacccccugcuguacgacgccaacuacuuccucugcuggcacaccaacugcuacgacuacugcaucccguacaacagcgugaccuccagcaucgucaucacguccggcgacggcaccaccagccccaucuccgagcacgacuaccagaucgggggcuacaccgagaagugggagagcggggugaaggacugcgugguccugcacuccuacuucacgagcgacuacuaccagcuguacuccacccagcucagcaccgacaccggcguggagcacgugacguucuucaucuacaacaagaucgucgacgagcccgaggagcacgugcagauccacaccaucgacggguccagcggcguggucaaccccgugauggagccgaucuacgacgagcccaccaccacgaccagcgugccccugugaggacuaguuauaagacugacuagcccgaugggccucccaacgggcccuccuccccuccuugcaccgagauuaauaaaaaaaaaaaaaaaaaaaaaaaaaaaaaaaaaaaaaaaaaaaaaaaaaaaaaaaaaaaaaaaaugcaucccccccccccccccccccccccccccccccaaaggcucuuuucagagccaccagaauu

SEQ ID NO: 28494 - RNA, 583 nt, Artificial Sequence
  SARS-CoV-2/Wuhan-Hu-1__NC_045512.2/MN908947.2/EPI_ISL_402128__ORF 8 protein (ORF8) mRNA gc (1-121)(R52I_Y73C)
aggagaaagcuuaccaugaaguuccugguguuccucggcaucaucaccaccgucgccgccuuccaccaggagugcagccugcaguccugcacgcagcaccagcccuacgugguggacgacccgugccccauccacuucuacagcaagugguacauccgcgucggggccaucaaguccgcgccccugaucgagcucugcguggacgaggccggcagcaagucccccauccagugcaucgacaucgggaacuacaccgugagcugccugccguucaccaucaacugccaggagcccaagcugggcucccucgucgugcgcugcagcuucuacgaggacuuccuggaguaccacgacgugcgggucgugcuggacuucaucugaggacuaguuauaagacugacuagcccgaugggccucccaacgggcccuccuccccuccuugcaccgagauuaauaaaaaaaaaaaaaaaaaaaaaaaaaaaaaaaaaaaaaaaaaaaaaaaaaaaaaaaaaaaaaaaaugcaucccccccccccccccccccccccccccccccaaaggcucuuuucagagccaccagaauu

SEQ ID NO: 28495 - RNA, 583 nt, Artificial Sequence
  SARS-CoV-2/Wuhan-Hu-1__NC_045512.2/MN908947.2/EPI_ISL_402128__ORF 8 protein (ORF8) mRNA gc (1-121)(E92K)
aggagaaagcuuaccaugaaguuccugguguuccucggcaucaucaccaccgucgccgccuuccaccaggagugcagccugcaguccugcacgcagcaccagcccuacgugguggacgacccgugccccauccacuucuacagcaagugguacauccgcgucggggcccggaaguccgcgccccugaucgagcucugcguggacgaggccggcagcaagucccccauccaguacaucgacaucgggaacuacaccgugagcugccugccguucaccaucaacugccagaagcccaagcugggcucccucgucgugcgcugcagcuucuacgaggacuuccuggaguaccacgacgugcgggucgugcuggacuucaucugaggacuaguuauaagacugacuagcccgaugggccucccaacgggcccuccuccccuccuugcaccgagauuaauaaaaaaaaaaaaaaaaaaaaaaaaaaaaaaaaaaaaaaaaaaaaaaaaaaaaaaaaaaaaaaaaugcaucccccccccccccccccccccccccccccccaaaggcucuuuucagagccaccagaauu

SEQ ID NO: 28496 - RNA, 577 nt, Artificial Sequence
  SARS-CoV-2/Wuhan-Hu-1__NC_045512.2/MN908947.2/EPI_ISL_402128__ORF 8 protein (ORF8) mRNA gc (1-121)(D119I_F120del_I121del)
aggagaaagcuuaccaugaaguuccugguguuccucggcaucaucaccaccgucgccgccuuccaccaggagugcagccugcaguccugcacgcagcaccagcccuacgugguggacgacccgugccccauccacuucuacagcaagugguacauccgcgucggggcccggaaguccgcgccccugaucgagcucugcguggacgaggccggcagcaagucccccauccaguacaucgacaucgggaacuacaccgugagcugccugccguucaccaucaacugccaggagcccaagcugggcucccucgucgugcgcugcagcuucuacgaggacuuccuggaguaccacgacgugcgggucgugcugaucugaggacuaguuauaagacugacuagcccgaugggccucccaacgggcccuccuccccuccuugcaccgagauuaauaaaaaaaaaaaaaaaaaaaaaaaaaaaaaaaaaaaaaaaaaaaaaaaaaaaaaaaaaaaaaaaaugcaucccccccccccccccccccccccccccccccaaaggcucuuuucagagccaccagaauu

SEQ ID NO: 28497 - RNA, 583 nt, Artificial Sequence
  SARS-CoV-2/Wuhan-Hu-1__NC_045512.2/MN908947.2/EPI_ISL_402128__ORF 8 protein (ORF8) mRNA gc (1-121)(K44R_F120V_I121L)
aggagaaagcuuaccaugaaguuccugguguuccucggcaucaucaccaccgucgccgccuuccaccaggagugcagccugcaguccugcacgcagcaccagcccuacgugguggacgacccgugccccauccacuucuacagccgcugguacauccgcgucggggcccggaaguccgcgccccugaucgagcucugcguggacgaggccggcagcaagucccccauccaguacaucgacaucgggaacuacaccgugagcugccugccguucaccaucaacugccaggagcccaagcugggcucccucgucgugcgcugcagcuucuacgaggacuuccuggaguaccacgacgugcgggucgugcuggacgugcugugaggacuaguuauaagacugacuagcccgaugggccucccaacgggcccuccuccccuccuugcaccgagauuaauaaaaaaaaaaaaaaaaaaaaaaaaaaaaaaaaaaaaaaaaaaaaaaaaaaaaaaaaaaaaaaaaugcaucccccccccccccccccccccccccccccccaaaggcucuuuucagagccaccagaauu

SEQ ID NO: 28498 - RNA, 583 nt, Artificial Sequence
  SARS-CoV-2/Wuhan-Hu-1__NC_045512.2/MN908947.2/EPI_ISL_402128__ORF 8 protein (ORF8) mRNA gc (1-121)(K2Q)
aggagaaagcuuaccaugcaguuccugguguuccucggcaucaucaccaccgucgccgccuuccaccaggagugcagccugcaguccugcacgcagcaccagcccuacgugguggacgacccgugccccauccacuucuacagcaagugguacauccgcgucggggcccggaaguccgcgccccugaucgagcucugcguggacgaggccggcagcaagucccccauccaguacaucgacaucgggaacuacaccgugagcugccugccguucaccaucaacugccaggagcccaagcugggcucccucgucgugcgcugcagcuucuacgaggacuuccuggaguaccacgacgugcgggucgugcuggacuucaucugaggacuaguuauaagacugacuagcccgaugggccucccaacgggcccuccuccccuccuugcaccgagauuaauaaaaaaaaaaaaaaaaaaaaaaaaaaaaaaaaaaaaaaaaaaaaaaaaaaaaaaaaaaaaaaaaugcaucccccccccccccccccccccccccccccccaaaggcucuuuucagagccaccagaauu

SEQ ID NO: 28499 - RNA, 583 nt, Artificial Sequence
  SARS-CoV-2/Wuhan-Hu-1__NC_045512.2/MN908947.2/EPI_ISL_402128__ORF 8 protein (ORF8) mRNA gc (1-121)(T11I)
aggagaaagcuuaccaugaaguuccugguguuccucggcaucaucaucaccgucgccgccuuccaccaggagugcagccugcaguccugcacgcagcaccagcccuacgugguggacgacccgugccccauccacuucuacagcaagugguacauccgcgucggggcccggaaguccgcgccccugaucgagcucugcguggacgaggccggcagcaagucccccauccaguacaucgacaucgggaacuacaccgugagcugccugccguucaccaucaacugccaggagcccaagcugggcucccucgucgugcgcugcagcuucuacgaggacuuccuggaguaccacgacgugcgggucgugcuggacuucaucugaggacuaguuauaagacugacuagcccgaugggccucccaacgggcccuccuccccuccuugcaccgagauuaauaaaaaaaaaaaaaaaaaaaaaaaaaaaaaaaaaaaaaaaaaaaaaaaaaaaaaaaaaaaaaaaaugcaucccccccccccccccccccccccccccccccaaaggcucuuuucagagccaccagaauu

SEQ ID NO: 28500 - RNA, 583 nt, Artificial Sequence
  SARS-CoV-2/Wuhan-Hu-1__NC_045512.2/MN908947.2/EPI_ISL_402128__ORF 8 protein (ORF8) mRNA gc (1-121)(T11K_P38S_S67F)
aggagaaagcuuaccaugaaguuccugguguuccucggcaucaucaagaccgucgccgccuuccaccaggagugcagccugcaguccugcacgcagcaccagcccuacgugguggacgacccgugcagcauccacuucuacagcaagugguacauccgcgucggggcccggaaguccgcgccccugaucgagcucugcguggacgaggccggcuucaagucccccauccaguacaucgacaucgggaacuacaccgugagcugccugccguucaccaucaacugccaggagcccaagcugggcucccucgucgugcgcugcagcuucuacgaggacuuccuggaguaccacgacgugcgggucgugcuggacuucaucugaggacuaguuauaagacugacuagcccgaugggccucccaacgggcccuccuccccuccuugcaccgagauuaauaaaaaaaaaaaaaaaaaaaaaaaaaaaaaaaaaaaaaaaaaaaaaaaaaaaaaaaaaaaaaaaaugcaucccccccccccccccccccccccccccccccaaaggcucuuuucagagccaccagaauu

SEQ ID NO: 28501 - RNA, 583 nt, Artificial Sequence
  SARS-CoV-2/Wuhan-Hu-1__NC_045512.2/MN908947.2/EPI_ISL_402128__ORF 8 protein (ORF8) mRNA gc (1-121)(T26I)
aggagaaagcuuaccaugaaguuccugguguuccucggcaucaucaccaccgucgccgccuuccaccaggagugcagccugcaguccugcauccagcaccagcccuacgugguggacgacccgugccccauccacuucuacagcaagugguacauccgcgucggggcccggaaguccgcgccccugaucgagcucugcguggacgaggccggcagcaagucccccauccaguacaucgacaucgggaacuacaccgugagcugccugccguucaccaucaacugccaggagcccaagcugggcucccucgucgugcgcugcagcuucuacgaggacuuccuggaguaccacgacgugcgggucgugcuggacuucaucugaggacuaguuauaagacugacuagcccgaugggccucccaacgggcccuccuccccuccuugcaccgagauuaauaaaaaaaaaaaaaaaaaaaaaaaaaaaaaaaaaaaaaaaaaaaaaaaaaaaaaaaaaaaaaaaaugcaucccccccccccccccccccccccccccccccaaaggcucuuuucagagccaccagaauu

SEQ ID NO: 28502 - RNA, 583 nt, Artificial Sequence
  SARS-CoV-2/Wuhan-Hu-1__NC_045512.2/MN908947.2/EPI_ISL_402128__ORF 8 protein (ORF8) mRNA gc (1-121)(F3Y)
aggagaaagcuuaccaugaaguaccugguguuccucggcaucaucaccaccgucgccgccuuccaccaggagugcagccugcaguccugcacgcagcaccagcccuacgugguggacgacccgugccccauccacuucuacagcaagugguacauccgcgucggggcccggaaguccgcgccccugaucgagcucugcguggacgaggccggcagcaagucccccauccaguacaucgacaucgggaacuacaccgugagcugccugccguucaccaucaacugccaggagcccaagcugggcucccucgucgugcgcugcagcuucuacgaggacuuccuggaguaccacgacgugcgggucgugcuggacuucaucugaggacuaguuauaagacugacuagcccgaugggccucccaacgggcccuccuccccuccuugcaccgagauuaauaaaaaaaaaaaaaaaaaaaaaaaaaaaaaaaaaaaaaaaaaaaaaaaaaaaaaaaaaaaaaaaaugcaucccccccccccccccccccccccccccccccaaaggcucuuuucagagccaccagaauu

SEQ ID NO: 28503 - RNA, 583 nt, Artificial Sequence
  SARS-CoV-2/Wuhan-Hu-1__NC_045512.2/MN908947.2/EPI_ISL_402128__ORF 8 protein (ORF8) mRNA gc (1-121)(T11I_A51S)
aggagaaagcuuaccaugaaguuccugguguuccucggcaucaucaucaccgucgccgccuuccaccaggagugcagccugcaguccugcacgcagcaccagcccuacgugguggacgacccgugccccauccacuucuacagcaagugguacauccgcgucgggagccggaaguccgcgccccugaucgagcucugcguggacgaggccggcagcaagucccccauccaguacaucgacaucgggaacuacaccgugagcugccugccguucaccaucaacugccaggagcccaagcugggcucccucgucgugcgcugcagcuucuacgaggacuuccuggaguaccacgacgugcgggucgugcuggacuucaucugaggacuaguuauaagacugacuagcccgaugggccucccaacgggcccuccuccccuccuugcaccgagauuaauaaaaaaaaaaaaaaaaaaaaaaaaaaaaaaaaaaaaaaaaaaaaaaaaaaaaaaaaaaaaaaaaugcaucccccccccccccccccccccccccccccccaaaggcucuuuucagagccaccagaauu

SEQ ID NO: 28504 - RNA, 583 nt, Artificial Sequence
  SARS-CoV-2/Wuhan-Hu-1__NC_045512.2/MN908947.2/EPI_ISL_402128__ORF 8 protein (ORF8) mRNA gc (1-121)(V32L_V100L)
aggagaaagcuuaccaugaaguuccugguguuccucggcaucaucaccaccgucgccgccuuccaccaggagugcagccugcaguccugcacgcagcaccagcccuaccugguggacgacccgugccccauccacuucuacagcaagugguacauccgcgucggggcccggaaguccgcgccccugaucgagcucugcguggacgaggccggcagcaagucccccauccaguacaucgacaucgggaacuacaccgugagcugccugccguucaccaucaacugccaggagcccaagcugggcucccucguccugcgcugcagcuucuacgaggacuuccuggaguaccacgacgugcgggucgugcuggacuucaucugaggacuaguuauaagacugacuagcccgaugggccucccaacgggcccuccuccccuccuugcaccgagauuaauaaaaaaaaaaaaaaaaaaaaaaaaaaaaaaaaaaaaaaaaaaaaaaaaaaaaaaaaaaaaaaaaugcaucccccccccccccccccccccccccccccccaaaggcucuuuucagagccaccagaauu

SEQ ID NO: 28505 - RNA, 583 nt, Artificial Sequence
  SARS-CoV-2/Wuhan-Hu-1__NC_045512.2/MN908947.2/EPI_ISL_402128__ORF 8 protein (ORF8) mRNA gc (1-121)(A65V)
aggagaaagcuuaccaugaaguuccugguguuccucggcaucaucaccaccgucgccgccuuccaccaggagugcagccugcaguccugcacgcagcaccagcccuacgugguggacgacccgugccccauccacuucuacagcaagugguacauccgcgucggggcccggaaguccgcgccccugaucgagcucugcguggacgaggugggcagcaagucccccauccaguacaucgacaucgggaacuacaccgugagcugccugccguucaccaucaacugccaggagcccaagcugggcucccucgucgugcgcugcagcuucuacgaggacuuccuggaguaccacgacgugcgggucgugcuggacuucaucugaggacuaguuauaagacugacuagcccgaugggccucccaacgggcccuccuccccuccuugcaccgagauuaauaaaaaaaaaaaaaaaaaaaaaaaaaaaaaaaaaaaaaaaaaaaaaaaaaaaaaaaaaaaaaaaaugcaucccccccccccccccccccccccccccccccaaaggcucuuuucagagccaccagaauu

SEQ ID NO: 28506 - RNA, 2026 nt, Artificial Sequence
  SARS-CoV-2/Wuhan-Hu-1__NC_045512.2/MN908947.2/EPI_ISL_402128__non -structural protein 13 (NSP13) mRNA gc (1-602)(P78L)
aggagaaagcuuaccauggccgugggcgccugcguccugugcaacagccagaccucccuccgcugcggggcgugcauccggcgccccuuccugugcugcaagugcugcuacgaccacgugaucagcaccucccacaagcuggugcucagcgucaacccguacgugugcaacgcccccggcugcgacgugacggacgucacccagcuguaccucgggggcauguccuacuacugcaagagccacaagcugcccaucuccuucccccugugcgccaacggccagguguucggccuguacaagaacacgugcgugggcagcgacaacgucaccgacuucaacgccaucgcgaccugcgacuggaccaacgccggggacuacauccuggccaacacgugcaccgagcggcucaagcuguucgccgccgagacccugaaggcgaccgaggagaccuucaagcucuccuacggcaucgccaccgugcgcgaggugcugagcgaccgggagcugcaccucuccugggaggucgggaagccccgcccgccccugaaccggaacuacguguucacgggcuaccgcgugaccaagaacagcaagguccagaucggggaguacaccuucgagaagggcgacuacggcgacgccgugguguaccgggggaccacgaccuacaagcugaacgucggcgacuacuucgugcucaccucccacaccgugaugccccugagcgcccccacgcuggucccccaggagcacuacgugcgcaucaccgggcucuaccccacccugaacaucuccgacgaguucagcuccaacguggccaacuaccagaaggucggcaugcagaaguacagcacccugcagggcccgcccgggacgggcaagucccacuucgcgaucgggcucgcccuguacuaccccagcgcccggaucguguacaccgccugcagccacgccgcggucgacgcccugugcgagaaggcccucaaguaccugcccaucgacaagugcucccgcaucaucccggcccgggcccgcguggagugcuucgacaaguucaaggugaacagcacccuggagcaguacgucuucugcaccgugaacgcgcuccccgagacgaccgccgacaucguggucuucgacgagaucuccauggccaccaacuacgaccugagcguggugaacgcccggcugcgcgccaagcacuacgucuacaucggcgaccccgcgcagcuccccgccccgcggacccugcugacgaaggggacccucgagcccgaguacuucaacuccgugugccgccugaugaagaccaucggccccgacauguuccuggggaccugccggcgcugccccgccgagaucguggacacggucagcgcccucguguacgacaacaagcugaaggcgcacaaggacaaguccgcccagugcuucaagauguucuacaagggggugaucacccacgacgucagcuccgccaucaaccggccgcagaucggcguggugcgcgaguuccugacccgcaaccccgccuggcggaaggccgucuucaucagccccuacaacucccagaacgcgguggccagcaagauccucgggcugcccacccagaccguggacuccagccagggcuccgaguacgacuacgucaucuucacgcagaccaccgagaccgcccacagcugcaacgugaaccgcuucaacguggccaucacgcgggccaaggucgggauccugugcaucauguccgaccgcgaccucuacgacaagcugcaguucaccagccuggagaucccgcggcgcaacguggcgacccugcagugaggacuaguuauaagacugacuagcccgaugggccucccaacgggcccuccuccccuccuugcaccgagauuaauaaaaaaaaaaaaaaaaaaaaaaaaaaaaaaaaaaaaaaaaaaaaaaaaaaaaaaaaaaaaaaaaugcaucccccccccccccccccccccccccccccccaaaggcucuuuucagagccaccagaauu

SEQ ID NO: 28507 - RNA, 2026 nt, Artificial Sequence
  SARS-CoV-2/Wuhan-Hu-1__NC_045512.2/MN908947.2/EPI_ISL_402128__non -structural protein 13 (NSP13) mRNA gc (1-602)(P79S_K461R)
aggagaaagcuuaccauggccgugggcgccugcguccugugcaacagccagaccucccuccgcugcggggcgugcauccggcgccccuuccugugcugcaagugcugcuacgaccacgugaucagcaccucccacaagcuggugcucagcgucaacccguacgugugcaacgcccccggcugcgacgugacggacgucacccagcuguaccucgggggcauguccuacuacugcaagagccacaagccgagcaucuccuucccccugugcgccaacggccagguguucggccuguacaagaacacgugcgugggcagcgacaacgucaccgacuucaacgccaucgcgaccugcgacuggaccaacgccggggacuacauccuggccaacacgugcaccgagcggcucaagcuguucgccgccgagacccugaaggcgaccgaggagaccuucaagcucuccuacggcaucgccaccgugcgcgaggugcugagcgaccgggagcugcaccucuccugggaggucgggaagccccgcccgccccugaaccggaacuacguguucacgggcuaccgcgugaccaagaacagcaagguccagaucggggaguacaccuucgagaagggcgacuacggcgacgccgugguguaccgggggaccacgaccuacaagcugaacgucggcgacuacuucgugcucaccucccacaccgugaugccccugagcgcccccacgcuggucccccaggagcacuacgugcgcaucaccgggcucuaccccacccugaacaucuccgacgaguucagcuccaacguggccaacuaccagaaggucggcaugcagaaguacagcacccugcagggcccgcccgggacgggcaagucccacuucgcgaucgggcucgcccuguacuaccccagcgcccggaucguguacaccgccugcagccacgccgcggucgacgcccugugcgagaaggcccucaaguaccugcccaucgacaagugcucccgcaucaucccggcccgggcccgcguggagugcuucgacaaguucaaggugaacagcacccuggagcaguacgucuucugcaccgugaacgcgcuccccgagacgaccgccgacaucguggucuucgacgagaucuccauggccaccaacuacgaccugagcguggugaacgcccggcugcgcgccaagcacuacgucuacaucggcgaccccgcgcagcuccccgccccgcggacccugcugacgaaggggacccucgagcccgaguacuucaacuccgugugccgccugaugaagaccaucggccccgacauguuccuggggaccugccggcgcugccccgccgagaucguggacacggucagcgcccucguguacgacaacagccugaaggcgcacaaggacaaguccgcccagugcuucaagauguucuacaagggggugaucacccacgacgucagcuccgccaucaaccggccgcagaucggcguggugcgcgaguuccugacccgcaaccccgccuggcggaaggccgucuucaucagccccuacaacucccagaacgcgguggccagcaagauccucgggcugcccacccagaccguggacuccagccagggcuccgaguacgacuacgucaucuucacgcagaccaccgagaccgcccacagcugcaacgugaaccgcuucaacguggccaucacgcgggccaaggucgggauccugugcaucauguccgaccgcgaccucuacgacaagcugcaguucaccagccuggagaucccgcggcgcaacguggcgacccugcagugaggacuaguuauaagacugacuagcccgaugggccucccaacgggcccuccuccccuccuugcaccgagauuaauaaaaaaaaaaaaaaaaaaaaaaaaaaaaaaaaaaaaaaaaaaaaaaaaaaaaaaaaaaaaaaaaugcaucccccccccccccccccccccccccccccccaaaggcucuuuucagagccaccagaauu

SEQ ID NO: 28508 - RNA, 2026 nt, Artificial Sequence
  SARS-CoV-2/Wuhan-Hu-1__NC_045512.2/MN908947.2/EPI_ISL_402128__non -structural protein 13 (NSP13) mRNA gc (1-602)(E342D)
aggagaaagcuuaccauggccgugggcgccugcguccugugcaacagccagaccucccuccgcugcggggcgugcauccggcgccccuuccugugcugcaagugcugcuacgaccacgugaucagcaccucccacaagcuggugcucagcgucaacccguacgugugcaacgcccccggcugcgacgugacggacgucacccagcuguaccucgggggcauguccuacuacugcaagagccacaagccgcccaucuccuucccccugugcgccaacggccagguguucggccuguacaagaacacgugcgugggcagcgacaacgucaccgacuucaacgccaucgcgaccugcgacuggaccaacgccggggacuacauccuggccaacacgugcaccgagcggcucaagcuguucgccgccgagacccugaaggcgaccgaggagaccuucaagcucuccuacggcaucgccaccgugcgcgaggugcugagcgaccgggagcugcaccucuccugggaggucgggaagccccgcccgccccugaaccggaacuacguguucacgggcuaccgcgugaccaagaacagcaagguccagaucggggaguacaccuucgagaagggcgacuacggcgacgccgugguguaccgggggaccacgaccuacaagcugaacgucggcgacuacuucgugcucaccucccacaccgugaugccccugagcgcccccacgcuggucccccaggagcacuacgugcgcaucaccgggcucuaccccacccugaacaucuccgacgaguucagcuccaacguggccaacuaccagaaggucggcaugcagaaguacagcacccugcagggcccgcccgggacgggcaagucccacuucgcgaucgggcucgcccuguacuaccccagcgcccggaucguguacaccgccugcagccacgccgcggucgacgcccugugcgagaaggcccucaaguaccugcccaucgacaagugcucccgcaucaucccggcccgggcccgcguggacugcuucgacaaguucaaggugaacagcacccuggagcaguacgucuucugcaccgugaacgcgcuccccgagacgaccgccgacaucguggucuucgacgagaucuccauggccaccaacuacgaccugagcguggugaacgcccggcugcgcgccaagcacuacgucuacaucggcgaccccgcgcagcuccccgccccgcggacccugcugacgaaggggacccucgagcccgaguacuucaacuccgugugccgccugaugaagaccaucggccccgacauguuccuggggaccugccggcgcugccccgccgagaucguggacacggucagcgcccucguguacgacaacaagcugaaggcgcacaaggacaaguccgcccagugcuucaagauguucuacaagggggugaucacccacgacgucagcuccgccaucaaccggccgcagaucggcguggugcgcgaguuccugacccgcaaccccgccuggcggaaggccgucuucaucagccccuacaacucccagaacgcgguggccagcaagauccucgggcugcccacccagaccguggacuccagccagggcuccgaguacgacuacgucaucuucacgcagaccaccgagaccgcccacagcugcaacgugaaccgcuucaacguggccaucacgcgggccaaggucgggauccugugcaucauguccgaccgcgaccucuacgacaagcugcaguucaccagccuggagaucccgcggcgcaacguggcgacccugcagugaggacuaguuauaagacugacuagcccgaugggccucccaacgggcccuccuccccuccuugcaccgagauuaauaaaaaaaaaaaaaaaaaaaaaaaaaaaaaaaaaaaaaaaaaaaaaaaaaaaaaaaaaaaaaaaaugcaucccccccccccccccccccccccccccccccaaaggcucuuuucagagccaccagaauu

SEQ ID NO: 28509 - RNA, 2026 nt, Artificial Sequence
  SARS-CoV-2/Wuhan-Hu-1__NC_045512.2/MN908947.2/EPI_ISL_402128__non -structural protein 13 (NSP13) mRNA gc (1-602)(T589I)
aggagaaagcuuaccauggccgugggcgccugcguccugugcaacagccagaccucccuccgcugcggggcgugcauccggcgccccuuccugugcugcaagugcugcuacgaccacgugaucagcaccucccacaagcuggugcucagcgucaacccguacgugugcaacgcccccggcugcgacgugacggacgucacccagcuguaccucgggggcauguccuacuacugcaagagccacaagccgcccaucuccuucccccugugcgccaacggccagguguucggccuguacaagaacacgugcgugggcagcgacaacgucaccgacuucaacgccaucgcgaccugcgacuggaccaacgccggggacuacauccuggccaacacgugcaccgagcggcucaagcuguucgccgccgagacccugaaggcgaccgaggagaccuucaagcucuccuacggcaucgccaccgugcgcgaggugcugagcgaccgggagcugcaccucuccugggaggucgggaagccccgcccgccccugaaccggaacuacguguucacgggcuaccgcgugaccaagaacagcaagguccagaucggggaguacaccuucgagaagggcgacuacggcgacgccgugguguaccgggggaccacgaccuacaagcugaacgucggcgacuacuucgugcucaccucccacaccgugaugccccugagcgcccccacgcuggucccccaggagcacuacgugcgcaucaccgggcucuaccccacccugaacaucuccgacgaguucagcuccaacguggccaacuaccagaaggucggcaugcagaaguacagcacccugcagggcccgcccgggacgggcaagucccacuucgcgaucgggcucgcccuguacuaccccagcgcccggaucguguacaccgccugcagccacgccgcggucgacgcccugugcgagaaggcccucaaguaccugcccaucgacaagugcucccgcaucaucccggcccgggcccgcguggagugcuucgacaaguucaaggugaacagcacccuggagcaguacgucuucugcaccgugaacgcgcuccccgagacgaccgccgacaucguggucuucgacgagaucuccauggccaccaacuacgaccugagcguggugaacgcccggcugcgcgccaagcacuacgucuacaucggcgaccccgcgcagcuccccgccccgcggacccugcugacgaaggggacccucgagcccgaguacuucaacuccgugugccgccugaugaagaccaucggccccgacauguuccuggggaccugccggcgcugccccgccgagaucguggacacggucagcgcccucguguacgacaacaagcugaaggcgcacaaggacaaguccgcccagugcuucaagauguucuacaagggggugaucacccacgacgucagcuccgccaucaaccggccgcagaucggcguggugcgcgaguuccugacccgcaaccccgccuggcggaaggccgucuucaucagccccuacaacucccagaacgcgguggccagcaagauccucgggcugcccacccagaccguggacuccagccagggcuccgaguacgacuacgucaucuucacgcagaccaccgagaccgcccacagcugcaacgugaaccgcuucaacguggccaucacgcgggccaaggucgggauccugugcaucauguccgaccgcgaccucuacgacaagcugcaguucaucagccuggagaucccgcggcgcaacguggcgacccugcagugaggacuaguuauaagacugacuagcccgaugggccucccaacgggcccuccuccccuccuugcaccgagauuaauaaaaaaaaaaaaaaaaaaaaaaaaaaaaaaaaaaaaaaaaaaaaaaaaaaaaaaaaaaaaaaaaugcaucccccccccccccccccccccccccccccccaaaggcucuuuucagagccaccagaauu

SEQ ID NO: 28510 - RNA, 2026 nt, Artificial Sequence
  SARS-CoV-2/Wuhan-Hu-1__NC_045512.2/MN908947.2/EPI_ISL_402128__non -structural protein 13 (NSP13) mRNA gc (1-602)(P54L_D261Y)
aggagaaagcuuaccauggccgugggcgccugcguccugugcaacagccagaccucccuccgcugcggggcgugcauccggcgccccuuccugugcugcaagugcugcuacgaccacgugaucagcaccucccacaagcuggugcucagcgucaacccguacgugugcaacgcccugggcugcgacgugacggacgucacccagcuguaccucgggggcauguccuacuacugcaagagccacaagccgcccaucuccuucccccugugcgccaacggccagguguucggccuguacaagaacacgugcgugggcagcgacaacgucaccgacuucaacgccaucgcgaccugcgacuggaccaacgccggggacuacauccuggccaacacgugcaccgagcggcucaagcuguucgccgccgagacccugaaggcgaccgaggagaccuucaagcucuccuacggcaucgccaccgugcgcgaggugcugagcgaccgggagcugcaccucuccugggaggucgggaagccccgcccgccccugaaccggaacuacguguucacgggcuaccgcgugaccaagaacagcaagguccagaucggggaguacaccuucgagaagggcgacuacggcgacgccgugguguaccgggggaccacgaccuacaagcugaacgucggcgacuacuucgugcucaccucccacaccgugaugccccugagcgcccccacgcuggucccccaggagcacuacgugcgcaucaccgggcucuaccccacccugaacaucuccuacgaguucagcuccaacguggccaacuaccagaaggucggcaugcagaaguacagcacccugcagggcccgcccgggacgggcaagucccacuucgcgaucgggcucgcccuguacuaccccagcgcccggaucguguacaccgccugcagccacgccgcggucgacgcccugugcgagaaggcccucaaguaccugcccaucgacaagugcucccgcaucaucccggcccgggcccgcguggagugcuucgacaaguucaaggugaacagcacccuggagcaguacgucuucugcaccgugaacgcgcuccccgagacgaccgccgacaucguggucuucgacgagaucuccauggccaccaacuacgaccugagcguggugaacgcccggcugcgcgccaagcacuacgucuacaucggcgaccccgcgcagcuccccgccccgcggacccugcugacgaaggggacccucgagcccgaguacuucaacuccgugugccgccugaugaagaccaucggccccgacauguuccuggggaccugccggcgcugccccgccgagaucguggacacggucagcgcccucguguacgacaacaagcugaaggcgcacaaggacaaguccgcccagugcuucaagauguucuacaagggggugaucacccacgacgucagcuccgccaucaaccggccgcagaucggcguggugcgcgaguuccugacccgcaaccccgccuggcggaaggccgucuucaucagccccuacaacucccagaacgcgguggccagcaagauccucgggcugcccacccagaccguggacuccagccagggcuccgaguacgacuacgucaucuucacgcagaccaccgagaccgcccacagcugcaacgugaaccgcuucaacguggccaucacgcgggccaaggucgggauccugugcaucauguccgaccgcgaccucuacgacaagcugcaguucaccagccuggagaucccgcggcgcaacguggcgacccugcagugaggacuaguuauaagacugacuagcccgaugggccucccaacgggcccuccuccccuccuugcaccgagauuaauaaaaaaaaaaaaaaaaaaaaaaaaaaaaaaaaaaaaaaaaaaaaaaaaaaaaaaaaaaaaaaaaugcaucccccccccccccccccccccccccccccccaaaggcucuuuucagagccaccagaauu

SEQ ID NO: 28511 - RNA, 2026 nt, Artificial Sequence
  SARS-CoV-2/Wuhan-Hu-1__NC_045512.2/MN908947.2/EPI_ISL_402128__non -structural protein 13 (NSP13) mRNA gc (1-602)(Q89H_H165Y)
aggagaaagcuuaccauggccgugggcgccugcguccugugcaacagccagaccucccuccgcugcggggcgugcauccggcgccccuuccugugcugcaagugcugcuacgaccacgugaucagcaccucccacaagcuggugcucagcgucaacccguacgugugcaacgcccccggcugcgacgugacggacgucacccagcuguaccucgggggcauguccuacuacugcaagagccacaagccgcccaucuccuucccccugugcgccaacggccacguguucggccuguacaagaacacgugcgugggcagcgacaacgucaccgacuucaacgccaucgcgaccugcgacuggaccaacgccggggacuacauccuggccaacacgugcaccgagcggcucaagcuguucgccgccgagacccugaaggcgaccgaggagaccuucaagcucuccuacggcaucgccaccgugcgcgaggugcugagcgaccgggagcuguaccucuccugggaggucgggaagccccgcccgccccugaaccggaacuacguguucacgggcuaccgcgugaccaagaacagcaagguccagaucggggaguacaccuucgagaagggcgacuacggcgacgccgugguguaccgggggaccacgaccuacaagcugaacgucggcgacuacuucgugcucaccucccacaccgugaugccccugagcgcccccacgcuggucccccaggagcacuacgugcgcaucaccgggcucuaccccacccugaacaucuccgacgaguucagcuccaacguggccaacuaccagaaggucggcaugcagaaguacagcacccugcagggcccgcccgggacgggcaagucccacuucgcgaucgggcucgcccuguacuaccccagcgcccggaucguguacaccgccugcagccacgccgcggucgacgcccugugcgagaaggcccucaaguaccugcccaucgacaagugcucccgcaucaucccggcccgggcccgcguggagugcuucgacaaguucaaggugaacagcacccuggagcaguacgucuucugcaccgugaacgcgcuccccgagacgaccgccgacaucguggucuucgacgagaucuccauggccaccaacuacgaccugagcguggugaacgcccggcugcgcgccaagcacuacgucuacaucggcgaccccgcgcagcuccccgccccgcggacccugcugacgaaggggacccucgagcccgaguacuucaacuccgugugccgccugaugaagaccaucggccccgacauguuccuggggaccugccggcgcugccccgccgagaucguggacacggucagcgcccucguguacgacaacaagcugaaggcgcacaaggacaaguccgcccagugcuucaagauguucuacaagggggugaucacccacgacgucagcuccgccaucaaccggccgcagaucggcguggugcgcgaguuccugacccgcaaccccgccuggcggaaggccgucuucaucagccccuacaacucccagaacgcgguggccagcaagauccucgggcugcccacccagaccguggacuccagccagggcuccgaguacgacuacgucaucuucacgcagaccaccgagaccgcccacagcugcaacgugaaccgcuucaacguggccaucacgcgggccaaggucgggauccugugcaucauguccgaccgcgaccucuacgacaagcugcaguucaccagccuggagaucccgcggcgcaacguggcgacccugcagugaggacuaguuauaagacugacuagcccgaugggccucccaacgggcccuccuccccuccuugcaccgagauuaauaaaaaaaaaaaaaaaaaaaaaaaaaaaaaaaaaaaaaaaaaaaaaaaaaaaaaaaaaaaaaaaaugcaucccccccccccccccccccccccccccccccaaaggcucuuuucagagccaccagaauu

SEQ ID NO: 28512 - RNA, 2026 nt, Artificial Sequence
  SARS-CoV-2/Wuhan-Hu-1__NC_045512.2/MN908947.2/EPI_ISL_402128__non -structural protein 13 (NSP13) mRNA gc (1-602)(D106Y_P530L)
aggagaaagcuuaccauggccgugggcgccugcguccugugcaacagccagaccucccuccgcugcggggcgugcauccggcgccccuuccugugcugcaagugcugcuacgaccacgugaucagcaccucccacaagcuggugcucagcgucaacccguacgugugcaacgcccccggcugcgacgugacggacgucacccagcuguaccucgggggcauguccuacuacugcaagagccacaagccgcccaucuccuucccccugugcgccaacggccagguguucggccuguacaagaacacgugcgugggcagcgacaacgucaccuacuucaacgccaucgcgaccugcgacuggaccaacgccggggacuacauccuggccaacacgugcaccgagcggcucaagcuguucgccgccgagacccugaaggcgaccgaggagaccuucaagcucuccuacggcaucgccaccgugcgcgaggugcugagcgaccgggagcugcaccucuccugggaggucgggaagccccgcccgccccugaaccggaacuacguguucacgggcuaccgcgugaccaagaacagcaagguccagaucggggaguacaccuucgagaagggcgacuacggcgacgccgugguguaccgggggaccacgaccuacaagcugaacgucggcgacuacuucgugcucaccucccacaccgugaugccccugagcgcccccacgcuggucccccaggagcacuacgugcgcaucaccgggcucuaccccacccugaacaucuccgacgaguucagcuccaacguggccaacuaccagaaggucggcaugcagaaguacagcacccugcagggcccgcccgggacgggcaagucccacuucgcgaucgggcucgcccuguacuaccccagcgcccggaucguguacaccgccugcagccacgccgcggucgacgcccugugcgagaaggcccucaaguaccugcccaucgacaagugcucccgcaucaucccggcccgggcccgcguggagugcuucgacaaguucaaggugaacagcacccuggagcaguacgucuucugcaccgugaacgcgcuccccgagacgaccgccgacaucguggucuucgacgagaucuccauggccaccaacuacgaccugagcguggugaacgcccggcugcgcgccaagcacuacgucuacaucggcgaccccgcgcagcuccccgccccgcggacccugcugacgaaggggacccucgagcccgaguacuucaacuccgugugccgccugaugaagaccaucggccccgacauguuccuggggaccugccggcgcugccccgccgagaucguggacacggucagcgcccucguguacgacaacaagcugaaggcgcacaaggacaaguccgcccagugcuucaagauguucuacaagggggugaucacccacgacgucagcuccgccaucaaccggccgcagaucggcguggugcgcgaguuccugacccgcaaccccgccuggcggaaggccgucuucaucagccccuacaacucccagaacgcgguggccagcaagauccucgggcugcugacccagaccguggacuccagccagggcuccgaguacgacuacgucaucuucacgcagaccaccgagaccgcccacagcugcaacgugaaccgcuucaacguggccaucacgcgggccaaggucgggauccugugcaucauguccgaccgcgaccucuacgacaagcugcaguucaccagccuggagaucccgcggcgcaacguggcgacccugcagugaggacuaguuauaagacugacuagcccgaugggccucccaacgggcccuccuccccuccuugcaccgagauuaauaaaaaaaaaaaaaaaaaaaaaaaaaaaaaaaaaaaaaaaaaaaaaaaaaaaaaaaaaaaaaaaaugcaucccccccccccccccccccccccccccccccaaaggcucuuuucagagccaccagaauu

SEQ ID NO: 28513 - RNA, 2026 nt, Artificial Sequence
  SARS-CoV-2/Wuhan-Hu-1__NC_045512.2/MN908947.2/EPI_ISL_402128__non -structural protein 13 (NSP13) mRNA gc (1-602)(P173H_E262D_P420S_P492S)
aggagaaagcuuaccauggccgugggcgccugcguccugugcaacagccagaccucccuccgcugcggggcgugcauccggcgccccuuccugugcugcaagugcugcuacgaccacgugaucagcaccucccacaagcuggugcucagcgucaacccguacgugugcaacgcccccggcugcgacgugacggacgucacccagcuguaccucgggggcauguccuacuacugcaagagccacaagccgcccaucuccuucccccugugcgccaacggccagguguucggccuguacaagaacacgugcgugggcagcgacaacgucaccgacuucaacgccaucgcgaccugcgacuggaccaacgccggggacuacauccuggccaacacgugcaccgagcggcucaagcuguucgccgccgagacccugaaggcgaccgaggagaccuucaagcucuccuacggcaucgccaccgugcgcgaggugcugagcgaccgggagcugcaccucuccugggaggucgggaagcaccgcccgccccugaaccggaacuacguguucacgggcuaccgcgugaccaagaacagcaagguccagaucggggaguacaccuucgagaagggcgacuacggcgacgccgugguguaccgggggaccacgaccuacaagcugaacgucggcgacuacuucgugcucaccucccacaccgugaugccccugagcgcccccacgcuggucccccaggagcacuacgugcgcaucaccgggcucuaccccacccugaacaucuccgacgacuucagcuccaacguggccaacuaccagaaggucggcaugcagaaguacagcacccugcagggcccgcccgggacgggcaagucccacuucgcgaucgggcucgcccuguacuaccccagcgcccggaucguguacaccgccugcagccacgccgcggucgacgcccugugcgagaaggcccucaaguaccugcccaucgacaagugcucccgcaucaucccggcccgggcccgcguggagugcuucgacaaguucaaggugaacagcacccuggagcaguacgucuucugcaccgugaacgcgcuccccgagacgaccgccgacaucguggucuucgacgagaucuccauggccaccaacuacgaccugagcguggugaacgcccggcugcgcgccaagcacuacgucuacaucggcgaccccgcgcagcuccccgccccgcggacccugcugacgaaggggacccucgagagcgaguacuucaacuccgugugccgccugaugaagaccaucggccccgacauguuccuggggaccugccggcgcugccccgccgagaucguggacacggucagcgcccucguguacgacaacaagcugaaggcgcacaaggacaaguccgcccagugcuucaagauguucuacaagggggugaucacccacgacgucagcuccgccaucaaccggagccagaucggcguggugcgcgaguuccugacccgcaaccccgccuggcggaaggccgucuucaucagccccuacaacucccagaacgcgguggccagcaagauccucgggcugcccacccagaccguggacuccagccagggcuccgaguacgacuacgucaucuucacgcagaccaccgagaccgcccacagcugcaacgugaaccgcuucaacguggccaucacgcgggccaaggucgggauccugugcaucauguccgaccgcgaccucuacgacaagcugcaguucaccagccuggagaucccgcggcgcaacguggcgacccugcagugaggacuaguuauaagacugacuagcccgaugggccucccaacgggcccuccuccccuccuugcaccgagauuaauaaaaaaaaaaaaaaaaaaaaaaaaaaaaaaaaaaaaaaaaaaaaaaaaaaaaaaaaaaaaaaaaugcaucccccccccccccccccccccccccccccccaaaggcucuuuucagagccaccagaauu

SEQ ID NO: 28514 - RNA, 2026 nt, Artificial Sequence
  SARS-CoV-2/Wuhan-Hu-1__NC_045512.2/MN908947.2/EPI_ISL_402128__non -structural protein 13 (NSP13) mRNA gc (1-602)(D261Y)
aggagaaagcuuaccauggccgugggcgccugcguccugugcaacagccagaccucccuccgcugcggggcgugcauccggcgccccuuccugugcugcaagugcugcuacgaccacgugaucagcaccucccacaagcuggugcucagcgucaacccguacgugugcaacgcccccggcugcgacgugacggacgucacccagcuguaccucgggggcauguccuacuacugcaagagccacaagccgcccaucuccuucccccugugcgccaacggccagguguucggccuguacaagaacacgugcgugggcagcgacaacgucaccgacuucaacgccaucgcgaccugcgacuggaccaacgccggggacuacauccuggccaacacgugcaccgagcggcucaagcuguucgccgccgagacccugaaggcgaccgaggagaccuucaagcucuccuacggcaucgccaccgugcgcgaggugcugagcgaccgggagcugcaccucuccugggaggucgggaagccccgcccgccccugaaccggaacuacguguucacgggcuaccgcgugaccaagaacagcaagguccagaucggggaguacaccuucgagaagggcgacuacggcgacgccgugguguaccgggggaccacgaccuacaagcugaacgucggcgacuacuucgugcucaccucccacaccgugaugccccugagcgcccccacgcuggucccccaggagcacuacgugcgcaucaccgggcucuaccccacccugaacaucuccuacgaguucagcuccaacguggccaacuaccagaaggucggcaugcagaaguacagcacccugcagggcccgcccgggacgggcaagucccacuucgcgaucgggcucgcccuguacuaccccagcgcccggaucguguacaccgccugcagccacgccgcggucgacgcccugugcgagaaggcccucaaguaccugcccaucgacaagugcucccgcaucaucccggcccgggcccgcguggagugcuucgacaaguucaaggugaacagcacccuggagcaguacgucuucugcaccgugaacgcgcuccccgagacgaccgccgacaucguggucuucgacgagaucuccauggccaccaacuacgaccugagcguggugaacgcccggcugcgcgccaagcacuacgucuacaucggcgaccccgcgcagcuccccgccccgcggacccugcugacgaaggggacccucgagcccgaguacuucaacuccgugugccgccugaugaagaccaucggccccgacauguuccuggggaccugccggcgcugccccgccgagaucguggacacggucagcgcccucguguacgacaacaagcugaaggcgcacaaggacaaguccgcccagugcuucaagauguucuacaagggggugaucacccacgacgucagcuccgccaucaaccggccgcagaucggcguggugcgcgaguuccugacccgcaaccccgccuggcggaaggccgucuucaucagccccuacaacucccagaacgcgguggccagcaagauccucgggcugcccacccagaccguggacuccagccagggcuccgaguacgacuacgucaucuucacgcagaccaccgagaccgcccacagcugcaacgugaaccgcuucaacguggccaucacgcgggccaaggucgggauccugugcaucauguccgaccgcgaccucuacgacaagcugcaguucaccagccuggagaucccgcggcgcaacguggcgacccugcagugaggacuaguuauaagacugacuagcccgaugggccucccaacgggcccuccuccccuccuugcaccgagauuaauaaaaaaaaaaaaaaaaaaaaaaaaaaaaaaaaaaaaaaaaaaaaaaaaaaaaaaaaaaaaaaaaugcaucccccccccccccccccccccccccccccccaaaggcucuuuucagagccaccagaauu

SEQ ID NO: 28515 - RNA, 1804 nt, Artificial Sequence
  SARS-CoV-2/Wuhan-Hu-1__NC_045512.2/MN908947.2/EPI_ISL_402128__non -structural protein 14 (NSP14) mRNA gc (1-528)(T32I_P143S_P444S)
aggagaaagcuuaccauggccgagaacgugaccggccuguucaaggacugcagcaaggucaucaccgggcuccaccccacgcaggccccgacccaccuguccguggacaucaaguucaagaccgagggccugugcguggacauccccgggauccccaaggacaugacguaccgccggcucaucagcaugaugggcuucaagaugaacuaccaggucaacggguaccccaacauguucaucacccgcgaggaggcgauccggcacgugcgcgccuggaucggcuucgacguggagggcugccacgccacccgggaggccgucgggaccaaccugccgcugcagcucggcuucuccacgggggugaaccugguggccguccccaccggcuacguggacacccccaacaacaccgacuucagccgcguguccgcgaagcccccgagcggggaccaguucaagcaccugaucccccucauguacaagggccugcccuggaacgucgugcggaucaagaucgugcagaugcugagcgacacgcucaagaaccuguccgaccgcgucguguucgugcugugggcccacggcuucgagcucaccagcaugaaguacuucgucaagaucgggccggagcggaccugcugccugugcgaccgccgggcgaccugcuucuccacggccagcgacaccuacgccugcuggcaccacuccaucggcuucgacuacguguacaaccccuucaugaucgacgugcagcaguggggguucaccggcaaccugcagagcaaccacgaccucuacugccagguccacggcaacgcccacguggccuccugcgacgccaucaugacccgcugccuggccgugcacgagugcuucgucaagcggguggacuggacgaucgaguaccccaucaucggggacgagcugaagaucaacgcggccugccgcaagguccagcacaugguggugaaggccgcccuccuggccgacaaguuccccguccugcacgacaucggcaacccgaaggcgaucaagugcgugccccaggccgacguggaguggaaguucuacgacgcccagcccugcagcgacaaggccuacaagaucgaggagcuguucuacuccuacgccacccacagcgacaaguucaccgacggggucugccuguucuggaacugcaacguggaccgguaccccgcgaacuccaucgugugccgcuucgacacccggguccugagcaaccucaaccugccgggcugcgacgggggcucccuguacgugaacaagcacgccuuccacacgcccgccuucgacaagagcgccuucgugaaccucaagcagcugagcuucuucuacuacagcgacucccccugcgagagccacggcaagcaggucguguccgacaucgacuacgugccgcucaagagcgcgaccugcaucacccgcugcaaccucgggggcgccgucugccggcaccacgccaacgaguaccgccuguaccuggacgccuacaacaugaugaucuccgccggguucagccucuggguguacaagcaguucgacaccuacaaccuguggaacacguucacccggcugcagugaggacuaguuauaagacugacuagcccgaugggccucccaacgggcccuccuccccuccuugcaccgagauuaauaaaaaaaaaaaaaaaaaaaaaaaaaaaaaaaaaaaaaaaaaaaaaaaaaaaaaaaaaaaaaaaaugcaucccccccccccccccccccccccccccccccaaaggcucuuuucagagccaccagaauu

SEQ ID NO: 28516 - RNA, 1804 nt, Artificial Sequence
  SARS-CoV-2/Wuhan-Hu-1__NC_045512.2/MN908947.2/EPI_ISL_402128__non -structural protein 14 (NSP14) mRNA gc (1-528)(P204L_F218Y_P328Q)
aggagaaagcuuaccauggccgagaacgugaccggccuguucaaggacugcagcaaggucaucaccgggcuccaccccacgcaggccccgacccaccuguccguggacaccaaguucaagaccgagggccugugcguggacauccccgggauccccaaggacaugacguaccgccggcucaucagcaugaugggcuucaagaugaacuaccaggucaacggguaccccaacauguucaucacccgcgaggaggcgauccggcacgugcgcgccuggaucggcuucgacguggagggcugccacgccacccgggaggccgucgggaccaaccugccgcugcagcucggcuucuccacgggggugaaccugguggccguccccaccggcuacguggacacccccaacaacaccgacuucagccgcguguccgcgaagcccccgcccggggaccaguucaagcaccugaucccccucauguacaagggccugcccuggaacgucgugcggaucaagaucgugcagaugcugagcgacacgcucaagaaccuguccgaccgcgucguguucgugcugugggcccacggcuucgagcucaccagcaugaaguacuucgucaagaucgggcuggagcggaccugcugccugugcgaccgccgggcgaccugcuacuccacggccagcgacaccuacgccugcuggcaccacuccaucggcuucgacuacguguacaaccccuucaugaucgacgugcagcaguggggguucaccggcaaccugcagagcaaccacgaccucuacugccagguccacggcaacgcccacguggccuccugcgacgccaucaugacccgcugccuggccgugcacgagugcuucgucaagcggguggacuggacgaucgaguaccccaucaucggggacgagcugaagaucaacgcggccugccgcaagguccagcacaugguggugaaggccgcccuccuggccgacaaguuccagguccugcacgacaucggcaacccgaaggcgaucaagugcgugccccaggccgacguggaguggaaguucuacgacgcccagcccugcagcgacaaggccuacaagaucgaggagcuguucuacuccuacgccacccacagcgacaaguucaccgacggggucugccuguucuggaacugcaacguggaccgguaccccgcgaacuccaucgugugccgcuucgacacccggguccugagcaaccucaaccugccgggcugcgacgggggcucccuguacgugaacaagcacgccuuccacacgcccgccuucgacaagagcgccuucgugaaccucaagcagcugcccuucuucuacuacagcgacucccccugcgagagccacggcaagcaggucguguccgacaucgacuacgugccgcucaagagcgcgaccugcaucacccgcugcaaccucgggggcgccgucugccggcaccacgccaacgaguaccgccuguaccuggacgccuacaacaugaugaucuccgccggguucagccucuggguguacaagcaguucgacaccuacaaccuguggaacacguucacccggcugcagugaggacuaguuauaagacugacuagcccgaugggccucccaacgggcccuccuccccuccuugcaccgagauuaauaaaaaaaaaaaaaaaaaaaaaaaaaaaaaaaaaaaaaaaaaaaaaaaaaaaaaaaaaaaaaaaaugcaucccccccccccccccccccccccccccccccaaaggcucuuuucagagccaccagaauu

SEQ ID NO: 28517 - RNA, 1804 nt, Artificial Sequence
  SARS-CoV-2/Wuhan-Hu-1__NC_045512.2/MN908947.2/EPI_ISL_402128__non -structural protein 14 (NSP14) mRNA gc (1-528)(E348G_P452S)
aggagaaagcuuaccauggccgagaacgugaccggccuguucaaggacugcagcaaggucaucaccgggcuccaccccacgcaggccccgacccaccuguccguggacaccaaguucaagaccgagggccugugcguggacauccccgggauccccaaggacaugacguaccgccggcucaucagcaugaugggcuucaagaugaacuaccaggucaacggguaccccaacauguucaucacccgcgaggaggcgauccggcacgugcgcgccuggaucggcuucgacguggagggcugccacgccacccgggaggccgucgggaccaaccugccgcugcagcucggcuucuccacgggggugaaccugguggccguccccaccggcuacguggacacccccaacaacaccgacuucagccgcguguccgcgaagcccccgcccggggaccaguucaagcaccugaucccccucauguacaagggccugcccuggaacgucgugcggaucaagaucgugcagaugcugagcgacacgcucaagaaccuguccgaccgcgucguguucgugcugugggcccacggcuucgagcucaccagcaugaaguacuucgucaagaucgggccggagcggaccugcugccugugcgaccgccgggcgaccugcuucuccacggccagcgacaccuacgccugcuggcaccacuccaucggcuucgacuacguguacaaccccuucaugaucgacgugcagcaguggggguucaccggcaaccugcagagcaaccacgaccucuacugccagguccacggcaacgcccacguggccuccugcgacgccaucaugacccgcugccuggccgugcacgagugcuucgucaagcggguggacuggacgaucgaguaccccaucaucggggacgagcugaagaucaacgcggccugccgcaagguccagcacaugguggugaaggccgcccuccuggccgacaaguuccccguccugcacgacaucggcaacccgaaggcgaucaagugcgugccccaggccgacgugggcuggaaguucuacgacgcccagcccugcagcgacaaggccuacaagaucgaggagcuguucuacuccuacgccacccacagcgacaaguucaccgacggggucugccuguucuggaacugcaacguggaccgguaccccgcgaacuccaucgugugccgcuucgacacccggguccugagcaaccucaaccugccgggcugcgacgggggcucccuguacgugaacaagcacgccuuccacacgcccgccuucgacaagagcgccuucgugaaccucaagcagcugcccuucuucuacuacagcgacuccagcugcgagagccacggcaagcaggucguguccgacaucgacuacgugccgcucaagagcgcgaccugcaucacccgcugcaaccucgggggcgccgucugccggcaccacgccaacgaguaccgccuguaccuggacgccuacaacaugaugaucuccgccggguucagccucuggguguacaagcaguucgacaccuacaaccuguggaacacguucacccggcugcagugaggacuaguuauaagacugacuagcccgaugggccucccaacgggcccuccuccccuccuugcaccgagauuaauaaaaaaaaaaaaaaaaaaaaaaaaaaaaaaaaaaaaaaaaaaaaaaaaaaaaaaaaaaaaaaaaugcaucccccccccccccccccccccccccccccccaaaggcucuuuucagagccaccagaauu

SEQ ID NO: 28518 - RNA, 1804 nt, Artificial Sequence
  SARS-CoV-2/Wuhan-Hu-1__NC_045512.2/MN908947.2/EPI_ISL_402128__non -structural protein 14 (NSP14) mRNA gc (1-528)(A395V)
aggagaaagcuuaccauggccgagaacgugaccggccuguucaaggacugcagcaaggucaucaccgggcuccaccccacgcaggccccgacccaccuguccguggacaccaaguucaagaccgagggccugugcguggacauccccgggauccccaaggacaugacguaccgccggcucaucagcaugaugggcuucaagaugaacuaccaggucaacggguaccccaacauguucaucacccgcgaggaggcgauccggcacgugcgcgccuggaucggcuucgacguggagggcugccacgccacccgggaggccgucgggaccaaccugccgcugcagcucggcuucuccacgggggugaaccugguggccguccccaccggcuacguggacacccccaacaacaccgacuucagccgcguguccgcgaagcccccgcccggggaccaguucaagcaccugaucccccucauguacaagggccugcccuggaacgucgugcggaucaagaucgugcagaugcugagcgacacgcucaagaaccuguccgaccgcgucguguucgugcugugggcccacggcuucgagcucaccagcaugaaguacuucgucaagaucgggccggagcggaccugcugccugugcgaccgccgggcgaccugcuucuccacggccagcgacaccuacgccugcuggcaccacuccaucggcuucgacuacguguacaaccccuucaugaucgacgugcagcaguggggguucaccggcaaccugcagagcaaccacgaccucuacugccagguccacggcaacgcccacguggccuccugcgacgccaucaugacccgcugccuggccgugcacgagugcuucgucaagcggguggacuggacgaucgaguaccccaucaucggggacgagcugaagaucaacgcggccugccgcaagguccagcacaugguggugaaggccgcccuccuggccgacaaguuccccguccugcacgacaucggcaacccgaaggcgaucaagugcgugccccaggccgacguggaguggaaguucuacgacgcccagcccugcagcgacaaggccuacaagaucgaggagcuguucuacuccuacgccacccacagcgacaaguucaccgacggggucugccuguucuggaacugcaacguggaccgguaccccgugaacuccaucgugugccgcuucgacacccggguccugagcaaccucaaccugccgggcugcgacgggggcucccuguacgugaacaagcacgccuuccacacgcccgccuucgacaagagcgccuucgugaaccucaagcagcugcccuucuucuacuacagcgacucccccugcgagagccacggcaagcaggucguguccgacaucgacuacgugccgcucaagagcgcgaccugcaucacccgcugcaaccucgggggcgccgucugccggcaccacgccaacgaguaccgccuguaccuggacgccuacaacaugaugaucuccgccggguucagccucuggguguacaagcaguucgacaccuacaaccuguggaacacguucacccggcugcagugaggacuaguuauaagacugacuagcccgaugggccucccaacgggcccuccuccccuccuugcaccgagauuaauaaaaaaaaaaaaaaaaaaaaaaaaaaaaaaaaaaaaaaaaaaaaaaaaaaaaaaaaaaaaaaaaugcaucccccccccccccccccccccccccccccccaaaggcucuuuucagagccaccagaauu

SEQ ID NO: 28519 - RNA, 1804 nt, Artificial Sequence
  SARS-CoV-2/Wuhan-Hu-1__NC_045512.2/MN908947.2/EPI_ISL_402128__non -structural protein 14 (NSP14) mRNA gc (1-528)(D145E_A275S)
aggagaaagcuuaccauggccgagaacgugaccggccuguucaaggacugcagcaaggucaucaccgggcuccaccccacgcaggccccgacccaccuguccguggacaccaaguucaagaccgagggccugugcguggacauccccgggauccccaaggacaugacguaccgccggcucaucagcaugaugggcuucaagaugaacuaccaggucaacggguaccccaacauguucaucacccgcgaggaggcgauccggcacgugcgcgccuggaucggcuucgacguggagggcugccacgccacccgggaggccgucgggaccaaccugccgcugcagcucggcuucuccacgggggugaaccugguggccguccccaccggcuacguggacacccccaacaacaccgacuucagccgcguguccgcgaagcccccgcccggggagcaguucaagcaccugaucccccucauguacaagggccugcccuggaacgucgugcggaucaagaucgugcagaugcugagcgacacgcucaagaaccuguccgaccgcgucguguucgugcugugggcccacggcuucgagcucaccagcaugaaguacuucgucaagaucgggccggagcggaccugcugccugugcgaccgccgggcgaccugcuucuccacggccagcgacaccuacgccugcuggcaccacuccaucggcuucgacuacguguacaaccccuucaugaucgacgugcagcaguggggguucaccggcaaccugcagagcaaccacgaccucuacugccagguccacggcaacgcccacguggccuccugcgacagcaucaugacccgcugccuggccgugcacgagugcuucgucaagcggguggacuggacgaucgaguaccccaucaucggggacgagcugaagaucaacgcggccugccgcaagguccagcacaugguggugaaggccgcccuccuggccgacaaguuccccguccugcacgacaucggcaacccgaaggcgaucaagugcgugccccaggccgacguggaguggaaguucuacgacgcccagcccugcagcgacaaggccuacaagaucgaggagcuguucuacuccuacgccacccacagcgacaaguucaccgacggggucugccuguucuggaacugcaacguggaccgguaccccgcgaacuccaucgugugccgcuucgacacccggguccugagcaaccucaaccugccgggcugcgacgggggcucccuguacgugaacaagcacgccuuccacacgcccgccuucgacaagagcgccuucgugaaccucaagcagcugcccuucuucuacuacagcgacucccccugcgagagccacggcaagcaggucguguccgacaucgacuacgugccgcucaagagcgcgaccugcaucacccgcugcaaccucgggggcgccgucugccggcaccacgccaacgaguaccgccuguaccuggacgccuacaacaugaugaucuccgccggguucagccucuggguguacaagcaguucgacaccuacaaccuguggaacacguucacccggcugcagugaggacuaguuauaagacugacuagcccgaugggccucccaacgggcccuccuccccuccuugcaccgagauuaauaaaaaaaaaaaaaaaaaaaaaaaaaaaaaaaaaaaaaaaaaaaaaaaaaaaaaaaaaaaaaaaaugcaucccccccccccccccccccccccccccccccaaaggcucuuuucagagccaccagaauu

SEQ ID NO: 28520 - RNA, 1804 nt, Artificial Sequence
  SARS-CoV-2/Wuhan-Hu-1__NC_045512.2/MN908947.2/EPI_ISL_402128__non -structural protein 14 (NSP14) mRNA gc (1-528)(D145G_Q355H)
aggagaaagcuuaccauggccgagaacgugaccggccuguucaaggacugcagcaaggucaucaccgggcuccaccccacgcaggccccgacccaccuguccguggacaccaaguucaagaccgagggccugugcguggacauccccgggauccccaaggacaugacguaccgccggcucaucagcaugaugggcuucaagaugaacuaccaggucaacggguaccccaacauguucaucacccgcgaggaggcgauccggcacgugcgcgccuggaucggcuucgacguggagggcugccacgccacccgggaggccgucgggaccaaccugccgcugcagcucggcuucuccacgggggugaaccugguggccguccccaccggcuacguggacacccccaacaacaccgacuucagccgcguguccgcgaagcccccgcccgggggccaguucaagcaccugaucccccucauguacaagggccugcccuggaacgucgugcggaucaagaucgugcagaugcugagcgacacgcucaagaaccuguccgaccgcgucguguucgugcugugggcccacggcuucgagcucaccagcaugaaguacuucgucaagaucgggccggagcggaccugcugccugugcgaccgccgggcgaccugcuucuccacggccagcgacaccuacgccugcuggcaccacuccaucggcuucgacuacguguacaaccccuucaugaucgacgugcagcaguggggguucaccggcaaccugcagagcaaccacgaccucuacugccagguccacggcaacgcccacguggccuccugcgacgccaucaugacccgcugccuggccgugcacgagugcuucgucaagcggguggacuggacgaucgaguaccccaucaucggggacgagcugaagaucaacgcggccugccgcaagguccagcacaugguggugaaggccgcccuccuggccgacaaguuccccguccugcacgacaucggcaacccgaaggcgaucaagugcgugccccaggccgacguggaguggaaguucuacgacgcccaccccugcagcgacaaggccuacaagaucgaggagcuguucuacuccuacgccacccacagcgacaaguucaccgacggggucugccuguucuggaacugcaacguggaccgguaccccgcgaacuccaucgugugccgcuucgacacccggguccugagcaaccucaaccugccgggcugcgacgggggcucccuguacgugaacaagcacgccuuccacacgcccgccuucgacaagagcgccuucgugaaccucaagcagcugcccuucuucuacuacagcgacucccccugcgagagccacggcaagcaggucguguccgacaucgacuacgugccgcucaagagcgcgaccugcaucacccgcugcaaccucgggggcgccgucugccggcaccacgccaacgaguaccgccuguaccuggacgccuacaacaugaugaucuccgccggguucagccucuggguguacaagcaguucgacaccuacaaccuguggaacacguucacccggcugcagugaggacuaguuauaagacugacuagcccgaugggccucccaacgggcccuccuccccuccuugcaccgagauuaauaaaaaaaaaaaaaaaaaaaaaaaaaaaaaaaaaaaaaaaaaaaaaaaaaaaaaaaaaaaaaaaaugcaucccccccccccccccccccccccccccccccaaaggcucuuuucagagccaccagaauu

SEQ ID NO: 28521 - RNA, 1804 nt, Artificial Sequence
  SARS-CoV-2/Wuhan-Hu-1__NC_045512.2/MN908947.2/EPI_ISL_402128__non -structural protein 14 (NSP14) mRNA gc (1-528)(S256I_A361V_A372T)
aggagaaagcuuaccauggccgagaacgugaccggccuguucaaggacugcagcaaggucaucaccgggcuccaccccacgcaggccccgacccaccuguccguggacaccaaguucaagaccgagggccugugcguggacauccccgggauccccaaggacaugacguaccgccggcucaucagcaugaugggcuucaagaugaacuaccaggucaacggguaccccaacauguucaucacccgcgaggaggcgauccggcacgugcgcgccuggaucggcuucgacguggagggcugccacgccacccgggaggccgucgggaccaaccugccgcugcagcucggcuucuccacgggggugaaccugguggccguccccaccggcuacguggacacccccaacaacaccgacuucagccgcguguccgcgaagcccccgcccggggaccaguucaagcaccugaucccccucauguacaagggccugcccuggaacgucgugcggaucaagaucgugcagaugcugagcgacacgcucaagaaccuguccgaccgcgucguguucgugcugugggcccacggcuucgagcucaccagcaugaaguacuucgucaagaucgggccggagcggaccugcugccugugcgaccgccgggcgaccugcuucuccacggccagcgacaccuacgccugcuggcaccacuccaucggcuucgacuacguguacaaccccuucaugaucgacgugcagcaguggggguucaccggcaaccugcagaucaaccacgaccucuacugccagguccacggcaacgcccacguggccuccugcgacgccaucaugacccgcugccuggccgugcacgagugcuucgucaagcggguggacuggacgaucgaguaccccaucaucggggacgagcugaagaucaacgcggccugccgcaagguccagcacaugguggugaaggccgcccuccuggccgacaaguuccccguccugcacgacaucggcaacccgaaggcgaucaagugcgugccccaggccgacguggaguggaaguucuacgacgcccagcccugcagcgacaagguguacaagaucgaggagcuguucuacuccuacaccacccacagcgacaaguucaccgacggggucugccuguucuggaacugcaacguggaccgguaccccgcgaacuccaucgugugccgcuucgacacccggguccugagcaaccucaaccugccgggcugcgacgggggcucccuguacgugaacaagcacgccuuccacacgcccgccuucgacaagagcgccuucgugaaccucaagcagcugcccuucuucuacuacagcgacucccccugcgagagccacggcaagcaggucguguccgacaucgacuacgugccgcucaagagcgcgaccugcaucacccgcugcaaccucgggggcgccgucugccggcaccacgccaacgaguaccgccuguaccuggacgccuacaacaugaugaucuccgccggguucagccucuggguguacaagcaguucgacaccuacaaccuguggaacacguucacccggcugcagugaggacuaguuauaagacugacuagcccgaugggccucccaacgggcccuccuccccuccuugcaccgagauuaauaaaaaaaaaaaaaaaaaaaaaaaaaaaaaaaaaaaaaaaaaaaaaaaaaaaaaaaaaaaaaaaaugcaucccccccccccccccccccccccccccccccaaaggcucuuuucagagccaccagaauu
